(19) United States
(12) Patent Application Publication
(10) Pub. No.: US 2011/0247094 A1
(43) Pub. Date: Oct. 6, 2011

(54) Transgenic Plants with Enhanced Agronomic Traits

(76) Inventors: Edward Allen, O'Fallon, MO (US); Molian Deng, Grover, MO (US); Brian Hauge, Wildwood, MO (US); Sergey Ivashuta, Ballwin, MO (US); Huai Wang, Chesterfield, MO (US)

(21) Appl. No.: 13/122,581

(22) PCT Filed: Oct. 7, 2009
(86) PCT No.: PCT/US09/59777

§ 371 Date: Jun. 13, 2011

Related U.S. Application Data
(60) Provisional application No. 61/103,594, filed on Oct. 8, 2008.

(51) Int. Cl. A01H 1/02; C12N 15/82; A01H 5/00; C12N 5/10; A01H 5/10; C12Q 1/68

(52) U.S. Cl. 800/275; 435/320.1; 800/298; 435/419; 800/320.1; 800/312; 800/314; 800/306; 800/320.3; 800/320.2; 435/6.1

(57) ABSTRACT

This invention provides transgenic plant cells with recombinant DNA for expression of proteins that are useful for imparting enhanced agronomic trait(s) to transgenic crop plants. This invention also provides transgenic plants and progeny seed comprising the transgenic plant cells where the plants are selected for having an enhanced trait selected from the group of traits consisting of enhanced water use efficiency, enhanced cold tolerance, increased yield, enhanced nitrogen use efficiency, enhanced seed protein and enhanced seed oil. Also disclosed are methods for manufacturing transgenic seed and plants with enhanced traits.

### CROSS REFERENCE TO RELATED APPLICATIONS

[0001] This application claims benefit under 35 USC §119(e) of U.S. provisional application Ser. No. 61/103594, filed Oct. 8, 2008, which is incorporated herein by reference in its entirety.

### INCORPORATION OF SEQUENCE LISTING

[0002] The sequence listing that is contained in the file named “38_{—}21_{—}56300_B_seqListing.txt”, which is 3,450,299 bytes (measured in MS-WINDOWS), created on Oct. 3, 2009 is filed herewith by electronic submission and incorporated herein by reference.

### FIELD OF THE INVENTION

[0003] Disclosed herein are recombinant DNA useful for providing enhanced traits to transgenic plants, seeds, pollen, plant cells and plant nuclei of such transgenic plants, methods of making and using such recombinant DNA, plants, seeds, pollen, plant cells and plant nuclei. Also disclosed are methods of producing hybrid corn seed comprising such recombinant DNA.

### SUMMARY OF THE INVENTION

[0004] In some aspects, this invention provides recombinant DNA constructs which comprise polynucleotides which modulate the expression of a protein without producing offtypes resulting from complete loss of the protein's function (e.g. through homozygous recessive mutations in the genomic DNA encoding the protein). This invention also provides recombinant DNA constructs comprising a polynucleotide which suppresses a protein having an SBP pfam domain scoring above 25.000. In specific embodiments, this invention provides a recombinant DNA construct comprising a polynucleotide which suppresses a protein having 95% identity over 95% of the length of SEQ ID NO: 19 where the recombinant DNA construct comprises a polynucleotide which encodes a miRNA. This invention also provides recombinant DNA constructs comprising a polynucleotide which encodes a protein that has an amino acid sequence having at least 95% identity over at least 95% of the length of a reference sequence selected from the group of sequences consisting of SEQ ID NO: 16-21 when the amino acid sequence is aligned with the reference sequence, or which is transcribed into a precursor of a miRNA that has the function of a miRNA with a sequence selected from SEQ ID NOs: 1-2, 7, 9-13, and 15. The recombinant DNA constructs are useful for providing enhanced traits when stably integrated into the chromosomes and expressed in transgenic plants cells. In further aspects, the invention provides plants cells comprising stably integrated recombinant DNA constructs of the invention. In particularly useful aspects of the invention, plant cells comprise stably integrated recombinant DNA constructs which include polynucleotides operably linked to a promoter which is functional in the plant cells. In some aspects of the invention, expression of the polynucleotides in the plant cells effect modulation of the expression of a protein. In other aspects of the invention, expression of the polynucleotides in the plant cells effect modulation of the activity of a miRNA. In some aspects, expression of the polynucleotides in the recombinant DNA of the invention is used to enhance expression of a protein, i.e. a protein that has at least 95% identity over at least 95% of the length of a reference sequence selected from SEQ ID NOs: 18 and 20 or to suppress expression of a protein, i.e. a protein having the function of a protein with a sequence selected from SEQ ID NOs: 16-17, 19, and 21. Likewise, in other aspects, expression of the polynucleotides in the recombinant DNA of the invention is used to enhance the activity of a miRNA having the function of a miRNA with a sequence selected from SEQ ID NOs: 1, 2, and 7, or to suppress the activity of a miRNA with the function of a miRNA having a sequence selected from SEQ ID NOs: 9-13 and 15. Polynucleotides in aspects of the invention used for enhancement of protein expression includes DNA which is transcribed into: (a) messenger RNA encoding the protein, (b) a miRNA decoy for a miRNA which targets a messenger RNA encoding the protein, (c) a messenger RNA which encodes the protein and is resistant to miRNA-mediated suppression, and (d) a small RNA which prevents cleavage of a messenger RNA encoding the protein. Polynucleotides in aspects of the invention used for suppression of protein expression includes DNA which is transcribed into: (a) a dsRNA which is processed into siRNAs which target a messenger RNA encoding the protein, (b) a miRNA that targets a messenger RNA encoding the protein, (c) a messenger RNA which encodes the protein and is sensitive to miRNA-mediated suppression, and (d) a trans-acting (ta) siRNA which is processed into siRNAs which target a messenger RNA encoding the protein. Polynucleotides in aspects of the invention used for enhancement of miRNA activity, includes DNA which is transcribed into RNA which encodes a miRNA. Polynucleotides in aspects of the invention used for suppression of miRNA activity includes DNA which is transcribed into a miRNA decoy for the miRNA.

[0005] This invention also provides transgenic plants comprising a plurality of transgenic plant cells of the invention, and transgenic seeds and transgenic pollen of such plants. Such transgenic plants are selected from a population of transgenic plants regenerated from plant cells transformed with recombinant DNA by screening transgenic plants for an enhanced trait as compared to control plants. The enhanced trait is one or more of enhanced water use efficiency, enhanced cold tolerance, increased yield, enhanced nitrogen use efficiency, enhanced seed protein and enhanced seed oil.

[0006] In another aspect of the invention the plant cells, plants, seeds, and pollen further comprise DNA expressing a protein that provides tolerance from exposure to an herbicide applied at levels that are lethal to a wild type plant cell.

[0007] This invention also provides methods for manufacturing non-natural, transgenic seed that can be used to produce a crop of transgenic plants with an enhanced trait resulting from expression of stably-integrated, recombinant DNA. More specifically, the method comprises (a) screening a population of plants for an enhanced trait and a recombinant DNA, where individual plants in the population can exhibit the trait at a level less than, essentially the same as or greater than the level that the trait is exhibited in control plants, (b) selecting from the population one or more plants that exhibit the trait at a level greater than the level that said trait is exhibited in control plants, (c) collecting seed from a selected plant, (d) verifying that the recombinant DNA is stably integrated in said selected plants, (e) analyzing tissue of a selected plant to determine the production or suppression of a protein having the function of a protein encoded by nucleotides in a sequence of one of SEQ ID NOs:16-21 or a miRNA having the function of a miRNA encoded by the nucleotides in a sequence of one of SEQ ID NOs: 1,2,7, 9-13, and 15. In one aspect of the invention, the plants in the population further comprise DNA expressing a protein that provides tolerance to exposure to a herbicide applied at levels that are lethal to wild type plant cells and the selecting is affected by treating the population with the herbicide, e.g. a glyphosate, dicamba, or glufosinate compound. In another aspect of the invention the plants are selected by identifying plants with the enhanced trait. The methods are especially useful for manufacturing corn, soybean, cotton, canola, alfalfa, wheat, rice, sugarcane or sugar beet seed.

[0008] Another aspect of the invention provides a method of producing hybrid corn seed comprising acquiring hybrid corn seed from a herbicide tolerant corn plant which also has stably-integrated, recombinant DNA comprising a promoter that is (a) functional in plant cells and (b) is operably linked to DNA that enhances or suppresses the expression of a protein having the function of a protein encoded by nucleotides in a sequence of one of SEQ ID NOs: 16-21 or which enhances or suppresses the activity of a miRNA having the function of a miRNA encoded by nucleotides in a sequence of one of SEQ ID NOs: 1,2,7, 9-13, and 15. The methods further comprise producing corn plants from said hybrid corn seed, wherein a fraction of the plants produced from said hybrid corn seed is homozygous for said recombinant DNA, a fraction of the plants produced from said hybrid corn seed is hemizygous for said recombinant DNA, and a fraction of the plants produced from said hybrid corn seed has none of said recombinant DNA; selecting corn plants which are homozygous and hemizygous for said recombinant DNA by treating with an herbicide; collecting seed from herbicide-treated-surviving corn plants and planting said seed to produce further progeny corn plants; repeating the selecting and collecting steps at least once to produce an inbred corn line; and crossing the inbred corn line with a second corn line to produce hybrid seed.

[0009] Another aspect of the invention provides a method of selecting a plant comprising plant cells of the invention by using an immunoreactive antibody to detect the presence or absence of protein expressed or suppressed by recombinant DNA in seed or plant tissue. Yet another aspect of the invention provides anti-counterfeit milled seed having, as an indication of origin, plant cells of this invention.

[0010] In unique aspects of the invention, the transgenic plants exhibit enhanced traits such as enhanced yield, enhanced yield under stress e.g. water deficit stress, nitrogen deficit stress, and cold stress as compared to control plants.

### BRIEF DESCRIPTION OF THE DRAWINGS

[0011] FIG. 1 shows a comparison of the leaf angle of corn plants with and without a synthetic miRNA for the suppression of LG1 expression.

### DETAILED DESCRIPTION OF THE INVENTION

[0012] In the attached sequence listing:

[0013] SEQ ID NO: 1-2, 7, 9-13, and 15 are nucleotide sequences of miRNAs;

[0014] SEQ ID NO:3-6, 8, and 14 are nucleotide sequences of the coding strand of DNA for “genes” used in the recombinant DNA imparting an enhanced trait in plant cells, i.e. each represents a coding sequence for a protein;

[0015] SEQ ID NO: 16-21 are amino acid sequences of the cognate protein of the “genes” with nucleotide coding sequences 3-6, 8, and 14;

[0016] SEQ ID NO: 22 is a nucleotide sequence of a base plasmid vector useful for corn transformation;

[0017] SEQ ID NO: 23 is a nucleotide sequence of a base plasmid vector useful for soybean and canola transformation;

[0018] SEQ ID NO: 24 is a nucleotide sequence of a base plasmid vector useful for cotton transformation;

[0019] SEQ ID NOs: 25-894 are sequences of proteins homologous to SEQ ID NOs: 16-21;

[0020] SEQ ID NOs: 895-1126 are nucleotide sequences of miRNAs homologous to SEQ ID NOs: 1-2, 7, 9-13, and 15.

[0021] SEQ ID NO: 1127 is a consensus sequence of SEQ ID NO: 16 and its homologs.

[0022] SEQ ID NOs: 1128-1140 are sequences of polynucleotides used to modulate expression of proteins or miRNAs of the invention.

[0023] As used herein a “plant cell” means a plant cell that is transformed with stably-integrated, non-natural, recombinant DNA, e.g. by Agrobacterium-mediated transformation or by bombardment using microparticles coated with recombinant DNA or other means. A plant cell of this invention can be an originally-transformed plant cell that exists as a microorganism or as a progeny plant cell that is regenerated into differentiated tissue, e.g. into a transgenic plant with stably-integrated, non-natural recombinant DNA, or seed or pollen derived from a progeny transgenic plant.

[0024] As used herein a “transgenic plant” means a plant whose genome has been altered by the stable integration of recombinant DNA. A transgenic plant includes a plant regenerated from an originally-transformed plant cell and progeny transgenic plants from later generations or crosses of a transformed plant.

[0025] As used herein “recombinant DNA” means DNA which has been a genetically engineered and constructed outside of a cell.

[0026] As used herein “consensus sequence” means an artificial sequence of amino acids in a conserved region of an alignment of amino acid sequences of homologous proteins, e.g. as determined by a CLUSTALW alignment of amino acid sequence of homolog proteins.

[0027] As used herein a “homolog” means a protein or miRNA in a group of proteins or miRNAs that perform the same biological function, e.g. proteins that belong to the same Pfam protein family and that provide a common enhanced trait in transgenic plants of this invention. Homologs are expressed by homologous genes. With reference to homologous genes, homologs include orthologs, i.e. genes expressed in different species that evolved from a common ancestral genes by speciation and encode proteins retain the same function, but do not include paralogs, i.e. genes that are related by duplication but have evolved to encode proteins with different functions. Homologous genes include naturally occurring alleles and artificially-created variants. Degeneracy of the genetic code provides the possibility to substitute at least one base of the protein encoding sequence of a gene with a different base without causing the amino acid sequence of the polypeptide produced from the gene to be changed. When optimally aligned, homolog proteins have at least 60%, 65%, 70%, 75%, 80%, 85%, 90%, 95%, 96%, 97%, 98%, or 99% identity over the full length of a protein identified as being associated with imparting an enhanced trait when expressed in plant cells. In one aspect of the invention homolog proteins have an amino acid sequence that has at least 90% identity to a consensus amino acid sequence of proteins and homologs disclosed herein. Genes for homologous miRNAs include any gene whose expression produces a miRNA having the function of a miRNA disclosed in table 1 such as the homologous miRNAs disclosed in table 7.

[0028] Homologous proteins are identified by comparison of amino acid sequence, e.g. manually or by use of a computer-based tool using known homology-based search algorithms such as those commonly known and referred to as BLAST, FASTA, and Smith-Waterman. A local sequence alignment program, e.g. BLAST, can be used to search a database of sequences to find similar sequences, and the summary Expectation value (E-value) used to measure the sequence base similarity. Because a protein hit with the best E-value for a particular organism may not necessarily be an ortholog, i.e. have the same function, or be the only ortholog, a reciprocal query is used to filter hit sequences with significant E-values for ortholog identification. The reciprocal query entails search of the significant hits against a database of amino acid sequences from the base organism that are similar to the sequence of the query protein. A hit can be identified as an ortholog, when the reciprocal query's best hit is the query protein itself or a protein encoded by a duplicated gene after speciation. A further aspect of the homologs encoded by DNA useful in the transgenic plants of the invention are those proteins that differ from a disclosed protein as the result of deletion or insertion of one or more amino acids in a native sequence.

[0029] Homologous miRNAs are identified by sequence comparison coupled to a comparison of secondary structure. Sequence databases are searched for regions having few (e.g. 1, 2, or 3) mismatches to a known miRNA. These regions are then examined for the potential to form a fold-back structure producing a similar pattern of matched and mismatched bases (e.g. using RNAfold from EMBOSS) to that found in the fold-back structure of the pre-miRNA for the known miRNA. Regions having few mismatches in the mature miRNA sequences and forming a similar fold-back structure are identified as homologous miRNAs.

[0030] “Percent identity” describes the extent to which the sequences of DNA or protein segments are invariant throughout a window of alignment of sequences, for example nucleotide sequences or amino acid sequences. An “identity fraction” for a sequence aligned with a reference sequence is the number of identical components which are shared by the sequences, divided by the length of the alignment not including gaps introduced by the alignment algorithm. “Percent identity” (“% identity”) is the identity fraction times 100. Percent identity is calculated over the aligned length preferably using a local alignment algorithm, such as BLASTp. As used herein, sequences are “aligned” when the alignment produced by BLASTp has a minimal e-value.

[0031] “Pfam” is a large collection of multiple sequence alignments and hidden Markov models covering many common protein families, e.g. Pfam version 19.0 (December 2005) contains alignments and models for 8183 protein families and is based on the Swissprot 47.0 and SP-TrEMBL 30.0 protein sequence databases. See S. R. Eddy, “Profile Hidden Markov Models”, Bioinformatics 14:755-763, 1998. The Pfam database is currently maintained and updated by the Pfam Consortium. The alignments represent some evolutionary conserved structure that has implications for the protein's function. Profile hidden Markov models (profile HMMs) built from the protein family alignments are useful for automatically recognizing that a new protein belongs to an existing protein family even if the homology by alignment appears to be low.

[0032] Protein domains are identified by querying the amino acid sequence of a protein against Hidden Markov Models which characterize protein family domains (“Pfam domains”) using HMMER software, which is available from the Pfam Consortium. The HMMER software is also disclosed in patent application publication U.S. 2008/0148432 A1 incorporated herein by reference. A protein domain meeting the gathering cutoff for the alignment of a particular Pfam domain is considered to contain the Pfam domain.

[0033] A “Pfam domain module” is a representation of Pfam domains in a protein, in order from N terminus to C terminus. In a Pfam domain module individual Pfam domains are separated by double colons “::”. The order and copy number of the Pfam domains from N to C terminus are attributes of a Pfam domain module. Although the copy number of repetitive domains is important, varying copy number often enables a similar function. Thus, a Pfam domain module with multiple copies of a domain should define an equivalent Pfam domain module with variance in the number of multiple copies. A Pfam domain module is not specific for distance between adjacent domains, but contemplates natural distances and variations in distance that provide equivalent function. The Pfam database contains both narrowly- and broadly-defined domains, leading to identification of overlapping domains on some proteins. A Pfam domain module is characterized by non-overlapping domains. Where there is overlap, the domain having a function that is more closely associated with the function of the protein (based on the E value of the Pfam match) is selected.

[0034] Once one DNA is identified as encoding a protein which imparts an enhanced trait when expressed in transgenic plants, other DNA encoding proteins with the same Pfam domain module are identified by querying the amino acid sequence of protein encoded by candidate DNA against the Hidden Markov Models which characterizes the Pfam domains using HMMER software. Candidate proteins meeting the same Pfam domain module are in the protein family and have cognate DNA that is useful in constructing recombinant DNA for the use in the plant cells of this invention. Hidden Markov Model databases for use with HMMER software in identifying DNA expressing protein with a common Pfam domain module for recombinant DNA in the plant cells of this invention are available from the Pfam Consortium (ftp.sanger.ac.uk/pub/databases/Pfam/) and are incorporated herein by reference.

[0035] The HMMER software and Pfam databases (version 23.0) were used to identify known domains in the proteins corresponding to amino acid sequence of SEQ ID NOs: 17-21. All DNA encoding proteins that have scores higher than the gathering cutoff disclosed in Table 11 by Pfam analysis disclosed herein can be used in recombinant DNA of the plant cells of this invention, e.g. for selecting transgenic plants having enhanced agronomic traits. The relevant Pfams modules for use in this invention, as more specifically disclosed below, are Homeobox::HALZ, SRF-TF::K-box, SBP, and HMGL-like::LeuA_dimer for which databases are available from the Pfam Consortium (ftp.sanger.ac.uk/pub/databases/Pfam/) and are incorporated herein by reference.

[0036] As used herein “promoter” means regulatory DNA for initializing transcription. A “plant promoter” is a promoter capable of initiating transcription in plant cells whether or not its origin is a plant cell, e.g. is it well known that Agrobacterium promoters are functional in plant cells. Thus, plant promoters include promoter DNA obtained from plants, plant viruses and bacteria such as Agrobacterium and Bradyrhizobium bacteria. Examples of promoters under developmental control include promoters that preferentially initiate transcription in certain tissues, such as leaves, roots, or seeds. Such promoters are referred to as “tissue preferred”. Promoters that initiate transcription only in certain tissues are referred to as “tissue specific”. A “cell type” specific promoter primarily drives expression in certain cell types in one or more organs, for example, vascular cells in roots or leaves. An “inducible” or “repressible” promoter is a promoter which is under environmental control. Examples of environmental conditions that may effect transcription by inducible promoters include anaerobic conditions, or certain chemicals, or the presence of light. Tissue specific, tissue preferred, cell type specific, and inducible promoters constitute the class of “non-constitutive” promoters. A “constitutive” promoter is a promoter which is active under most conditions.

[0037] As used herein “operably linked” means the association of two or more DNA fragments in a recombinant DNA construct so that the function of one, e.g. protein-encoding DNA, is controlled by the other, e.g. a promoter.

[0038] As used herein “expressed” means produced, e.g. a protein is expressed in a plant cell when its cognate DNA is transcribed to mRNA that is translated to the protein.

[0039] As used herein “suppressed” means decreased, e.g. a protein is suppressed in a plant cell when there is a decrease in the amount and/or activity of the protein in the plant cell. The presence or activity of the protein can be decreased by any amount up to and including a total loss of protein expression and/or activity.

[0040] As used herein a “control plant” means a plant that does not contain the recombinant DNA that expressed a protein that impart an enhanced trait. A control plant is to identify and select a transgenic plant that has an enhance trait. A suitable control plant can be a non-transgenic plant of the parental line used to generate a transgenic plant, i.e. devoid of recombinant DNA. A suitable control plant may in some cases be a progeny of a hemizygous transgenic plant line that is does not contain the recombinant DNA, known as a negative segregant.

[0041] As used herein an “enhanced trait” means a characteristic of a transgenic plant that includes, but is not limited to, an enhance agronomic trait characterized by enhanced plant morphology, physiology, growth and development, yield, nutritional enhancement, disease or pest resistance, or environmental or chemical tolerance. In more specific aspects of this invention enhanced trait is selected from group of enhanced traits consisting of enhanced water use efficiency, enhanced cold tolerance, increased yield, enhanced nitrogen use efficiency, enhanced seed protein and enhanced seed oil. In an important aspect of the invention the enhanced trait is enhanced yield including increased yield under non-stress conditions and increased yield under environmental stress conditions. Stress conditions may include, for example, drought, shade, fungal disease, viral disease, bacterial disease, insect infestation, nematode infestation, cold temperature exposure, heat exposure, osmotic stress, reduced nitrogen nutrient availability, reduced phosphorus nutrient availability and high plant density. “Yield” can be affected by many properties including without limitation, plant height, pod number, pod position on the plant, number of internodes, incidence of pod shatter, grain size, efficiency of nodulation and nitrogen fixation, efficiency of nutrient assimilation, resistance to biotic and abiotic stress, carbon assimilation, plant architecture, resistance to lodging, percent seed germination, seedling vigor, and juvenile traits. Yield can also be affected by efficiency of germination (including germination in stressed conditions), growth rate (including growth rate in stressed conditions), ear number, seed number per ear, seed size, composition of seed (starch, oil, protein) and characteristics of seed fill.

[0042] Increased yield of a transgenic plant of the present invention can be measured in a number of ways, including test weight, seed number per plant, seed weight, seed number per unit area (i.e. seeds, or weight of seeds, per acre), bushels per acre, tons per acre, or kilo per hectare. For example, corn yield may be measured as production of shelled corn kernels per unit of production area, for example in bushels per acre or metric tons per hectare, often reported on a moisture adjusted basis, for example at 15.5 percent moisture. Increased yield may result from improved utilization of key biochemical compounds, such as nitrogen, phosphorous and carbohydrate, or from improved responses to environmental stresses, such as cold, heat, drought, salt, and attack by pests or pathogens. Recombinant DNA used in this invention can also be used to provide plants having improved growth and development, and ultimately increased yield, as the result of modified expression of plant growth regulators or modification of cell cycle or photosynthesis pathways. Also of interest is the generation of transgenic plants that demonstrate enhanced yield with respect to a seed component that may or may not correspond to an increase in overall plant yield; such properties include enhancements in seed oil, seed molecules such as protein and starch, oil components as may be manifest by an alterations in the ratios of seed components.

[0043] The modulation of protein in transgenic plant cells (hereafter generally referred to as the “target protein”) can be achieved by a variety of approaches involving the use of recombinant DNA constructs. Examples of such recombinant DNA constructs include recombinant DNA constructs that produce messenger RNA for the target protein where native miRNA recognition sites in the mRNA for the target protein are modified or deleted, recombinant DNA constructs that produce an RNA gene suppression element such as a miRNA or a dsRNA comprising sense and anti-sense sequences from the gene encoding the target protein, recombinant DNA constructs that produce a transacting short interfering RNA (ta-siRNA) and recombinant DNA constructs that produce a miRNA element such as a decoy miRNA that is a target for native miRNA or RNA that sequesters target messenger RNA away from native miRNA.

[0044] Small RNAs that regulate protein expression include miRNAs and ta-siRNAs. A miRNA is a small (typically about 21 nucleotide) RNA that has the ability to modulate the expression of a target gene by binding to messenger RNA for the target protein leading to destabilization of the target protein messenger RNA or translational inhibition of the target protein messenger RNA, ultimately resulting in reduction of the target protein. The design and construction of ta-siRNA constructs and their use in the modulation of protein in transgenic plant cells is disclosed by Allen and Carrington in U.S. Patent Application Publication U.S. 2006/0174380 A1 which is incorporated herein by reference. The expression or suppression of such small RNAs are aspects of the invention that are conveniently illustrated by reference to use of miRNAs.

[0045] Recombinant DNA constructs can be used to modify the activity of native miRNAs by a variety of means. By increasing the expression of a miRNA, e.g. temporally or spatially, the modulation of expression of a native target gene can be enhanced. An alternative gene suppression approach for suppressing the expression of a target protein can include the use of a recombinant DNA construct that produces a synthetic miRNA that is designed to bind to a native or synthetic miRNA recognition site on messenger RNA for the target protein.

[0046] By reducing the expression of a miRNA, the modulation of a native target gene can be diminished resulting in enhanced expression of the target protein. More specifically, the expression of a target protein can be enhanced by suppression of the activity of the miRNA that binds to a recognition site in the messenger RNA that is transcribed from the native gene for the target protein. Several types of recombinant DNA constructs can be designed to suppress the activity of a miRNA.

[0047] For example, a recombinant DNA construct that produces an abundance of RNA with the miRNA recognition site can be used as a decoy for the native miRNA allowing endogenous messenger RNA with the miRNA recognition site to be translated to the target protein without interference from native miRNA. A recombinant DNA construct that produces RNA with a modified miRNA recognition site, e.g. with nucleotides at positions 10 and/or 11 in a 21mer miRNA recognition site which are unpaired with respect to the native miRNA, can be used to sequester natively expressed miRNA thereby reducing the cleavage that normally occurs when miRNA binds to a recognition site. The unpaired nucleotides can be produced e.g. through additional nucleotides between positions 10 and 11 or through substitutions of the nucleotides at positions 10 and 11.

[0048] Additionally, a recombinant DNA construct can be created that produces RNA that can be processed in plants into synthetic small RNA (miRNA-like) that can bind endogenous miRNA recognition sites but is unable to induce cleavage of mRNA because the small RNA is modified, for instance by having a modified nucleotide at positions 10 and/or 11 or a deletion that produces a bulge between positions 10 and 11 when the small RNA is paired with the miRNA recognition site. The resulting synthetic small RNA, a cleavage blocker, can reduce endogenous miRNA binding and thus block cleavage of a protected miRNA target site enhancing the expression of a target protein.

[0049] A recombinant DNA construct designed for producing a modified messenger RNA for the protein where the native miRNA recognition site is modified to be resistant to the binding of cognate miRNA which regulates the native gene can also be used to express protein from heterologous messenger RNA that is no longer modulated by the native miRNA.

[0050] The construction and description of such recombinant DNA constructs is disclosed in U.S. Patent Application Publication U.S. 2009/0070898 A1, and U.S. application Ser. No. 61/077,244, filed Jul. 1, 2008, both of which are incorporated herein by reference.

[0051] The activity of a miRNA which down-regulates an endogenous protein is enhanced by enhancing the expression of the miRNA or by enhancing the ability of the miRNA to bind an RNA encoding the target protein. A recombinant DNA encoding an RNA encoding the miRNA or a miRNA-sensitive messenger RNA encoding the protein in which a miRNA binding site is added are designed to enhance miRNA activity resulting in enhanced suppression of the target mRNA and cognate protein. Recombinant DNA encoding an RNA encoding a miRNA, or a miRNA-sensitive RNA are designed using methods disclosed in U.S. Patent Application Publication U.S. 2009/0070898 A1.

[0052] Some, if not many, miRNAs modulate the expression of multiple proteins or biochemical pathways. Transgenic plants can be provided with enhanced traits not so much from the suppression or enhancement of the expression of a particular protein, as from change of enzyme activity in a pathway by modulating the level of a miRNA. Thus, aspects of this invention are achieved by enhanced miRNA activity resulting from use in transgenic plant cells of recombinant DNA constructs that produce an enhanced level of a miRNA. Other aspects of this invention are achieved by reduced miRNA activity resulting from use in transgenic plant cells of recombinant DNA constructs that produce a reduced level or activity of a miRNA.

[0053] Recombinant DNA constructs are assembled using methods well known to persons of ordinary skill in the art and typically comprise a promoter operably linked to DNA that is transcribed to RNA, e.g. messenger RNA for encoding a protein or RNA that is designed to effect a gene suppression pathway. Other construct components may include additional regulatory elements, such as 5′ leaders and introns for enhancing transcription, 3′ untranslated regions (such as polyadenylation signals and sites), DNA for transit or signal peptides. Numerous promoters that are active in plant cells have been described in the literature and patents and known to those skilled in the art. A wide range of such elements and their use in the design of recombinant DNA constructs is especially well disclosed in U.S. Pat. No. 5,977,441, incorporated herein by reference

[0054] Transgenic plants comprising or derived from plant cells of this invention transformed with recombinant DNA can be further enhanced with stacked traits, e.g. a crop plant having an enhanced trait resulting from expression of DNA disclosed herein in combination with herbicide and/or pest resistance traits. For example, genes of the current invention can be stacked with other traits of agronomic interest, such as a trait providing herbicide resistance, or insect resistance, such as using a gene from Bacillus thuringensis to provide resistance against lepidopteran, coliopteran, homopteran, hemiopteran, and other insects. Herbicides for which transgenic plant tolerance has been demonstrated and the method of the present invention can be applied include, but are not limited to, glyphosate, dicamba, glufosinate, sulfonylurea, bromoxynil and norflurazon herbicides. Polynucleotide molecules encoding proteins involved in herbicide tolerance are well-known in the art and include, but are not limited to, a polynucleotide molecule encoding 5-enolpyruvylshikimate-3-phosphate synthase (EPSPS) disclosed in U.S. Pat. Nos. 5,094,945; 5,627,061; 5,633,435 and 6,040,497 for imparting glyphosate tolerance; polynucleotide molecules encoding a glyphosate oxidoreductase (GOX) disclosed in U.S. Pat. Nos. 5,463,175 and a glyphosate-N-acetyl transferase (GAT) disclosed in U.S. Patent Application Publication 2003/0083480 A1 also for imparting glyphosate tolerance; dicamba monooxygenase disclosed in U.S. Patent Application Publication 2003/0135879 A1 for imparting dicamba tolerance; a polynucleotide molecule encoding bromoxynil nitrilase (Bxn) disclosed in U.S. Pat. No. 4,810,648 for imparting bromoxynil tolerance; a polynucleotide molecule encoding phytoene desaturase (crtI) described in Misawa et al, (1993) Plant J. 4:833-840 and in Misawa et al, (1994) Plant J. 6:481-489 for norflurazon tolerance; a polynucleotide molecule encoding acetohydroxyacid synthase (AHAS, aka ALS) described in Sathasiivan et al. (1990) Nucl. Acids Res. 18:2188-2193 for imparting tolerance to sulfonylurea herbicides; polynucleotide molecules known as bar genes disclosed in DeBlock, et al. (1987) EMBO J. 6:2513-2519 for imparting glufosinate and bialaphos tolerance; polynucleotide molecules disclosed in U.S. Patent Application Publication 2003/010609 A1 for imparting N-amino methyl phosphonic acid tolerance; polynucleotide molecules disclosed in U.S. Pat. No. 6,107,549 for impartinig pyridine herbicide resistance; molecules and methods for imparting tolerance to multiple herbicides such as glyphosate, atrazine, ALS inhibitors, isoxoflutole and glufosinate herbicides are disclosed in U.S. Pat. No. 6,376,754 and U.S. Patent Application Publication 2002/0112260. Molecules and methods for imparting insect/nematode/virus resistance are disclosed in U.S. Pat. Nos. 5,250,515; 5,880,275; 6,506,599; 5,986,175 and U.S. Patent Application Publication 2003/0150017 A1.

### Plant Cell Transformation Methods

[0055] Numerous methods for transforming chromosomes in a plant cell nucleus with recombinant DNA are known in the art and are used in methods of preparing a transgenic plant cell nucleus cell, and plant. Two effective methods for such transformation are Agrobacterium-mediated transformation and microprojectile bombardment. Microprojectile bombardment methods are illustrated in U.S. Pat. No. 5,015,580 (soybean); U.S. Pat. No. 5,550,318 (corn); U.S. Pat. No. 5,538,880 (corn); U.S. Pat. No. 5,914,451 (soybean); U.S. Pat. No. 6,160,208 (corn); U.S. Pat. No. 6,399,861 (corn); U.S. Pat. No. 6,153,812 (wheat) and U.S. Pat. No. 6,365,807 (rice) and Agrobacterium-mediated transformation is described in U.S. Pat. Nos. 5,159,135 (cotton); 5,824,877 (soybean); 5,463,174 (canola); 5,591,616 (corn); 6,384,301 (soybean), 7,026,528 (wheat) 6,329,571 (rice), and U.S. Patent Application Publication 2001/0042257 A1 (sugar beet), all of which are incorporated herein by reference for enabling the production of transgenic plants. Transformation of plant material is practiced in tissue culture on a nutrient media, i.e. a mixture of nutrients that will allow cells to grow in vitro. Recipient cell targets include, but are not limited to, meristem cells, hypocotyls, calli, immature embryos and gametic cells such as microspores, pollen, sperm and egg cells. Callus may be initiated from tissue sources including, but not limited to, immature embryos, hypocotyls, seedling apical meristems, microspores and the like. Cells containing a transgenic nucleus are grown into transgenic plants.

[0056] In addition to direct transformation of a plant material with a recombinant DNA, a transgenic plant cell nucleus can be prepared by crossing a first plant having cells with a transgenic nucleus with recombinant DNA with a second plant lacking the trangenci nucleus. For example, recombinant DNA can be introduced into a nucleus from a first plant line that is amenable to transformation to transgenic nucleus in cells that are grown into a transgenic plant which can be crossed with a second plant line to introgress the recombinant DNA into the second plant line. A transgenic plant with recombinant DNA providing an enhanced trait, e.g. enhanced yield, can be crossed with transgenic plant line having other recombinant DNA that confers another trait, for example herbicide resistance or pest resistance, to produce progeny plants having recombinant DNA that confers both traits. Typically, in such breeding for combining traits the transgenic plant donating the additional trait is a male line and the transgenic plant carrying the base traits is the female line. The progeny of this cross will segregate such that some of the plants will carry the DNA for both parental traits and some will carry DNA for one parental trait; such plants can be identified by markers associated with parental recombinant DNA, e.g. marker identification by analysis for recombinant DNA or, in the case where a selectable marker is linked to the recombinant, by application of the selecting agent such as a herbicide for use with a herbicide tolerance marker, or by selection for the enhanced trait. Progeny plants carrying DNA for both parental traits can be crossed back into the female parent line multiple times, for example usually 6 to 8 generations, to produce a progeny plant with substantially the same genotype as one original transgenic parental line but for the recombinant DNA of the other transgenic parental line

[0057] In the practice of transformation DNA is typically introduced into only a small percentage of target plant cells in any one transformation experiment. Marker genes are used to provide an efficient system for identification of those cells that are stably transformed by receiving and integrating a recombinant DNA molecule into their genomes. Preferred marker genes provide selective markers which confer resistance to a selective agent, such as an antibiotic or a herbicide. Any of the herbicides to which plants of this invention may be resistant are useful agents for selective markers. Potentially transformed cells are exposed to the selective agent. In the population of surviving cells will be those cells where, generally, the resistance-conferring gene is integrated and expressed at sufficient levels to permit cell survival. Cells may be tested further to confirm stable integration of the exogenous DNA. Commonly used selective marker genes include those conferring resistance to antibiotics such as kanamycin and paromomycin (nptII), hygromycin B (aph IV), spectinomycin (aadA) and gentamycin (aac3 and aacC4) or resistance to herbicides such as glufosinate (bar or pat), dicamba (DMO) and glyphosate (aroA or EPSPS). Examples of such selectable markers are illustrated in U.S. Pat. Nos. 5,550,318; 5,633,435; 5,780,708 and 6,118,047. Selectable markers which provide an ability to visually identify transformants can also be employed, for example, a gene expressing a colored or fluorescent protein such as a luciferase or green fluorescent protein (GFP) or a gene expressing a beta-glucuronidase or uidA gene (GUS) for which various chromogenic substrates are known.

[0058] Plant cells that survive exposure to the selective agent, or plant cells that have been scored positive in a screening assay, may be cultured in regeneration media and allowed to mature into plants. Developing plantlets regenerated from transformed plant cells can be transferred to plant growth mix, and hardened off, for example, in an environmentally controlled chamber at about 85% relative humidity, 600 ppm CO₂, and 25-250 microeinsteins m⁻²s⁻¹ of light, prior to transfer to a greenhouse or growth chamber for maturation. Plants are regenerated from about 6 weeks to 10 months after a transformant is identified, depending on the initial tissue, and plant species. Plants may be pollinated using conventional plant breeding methods known to those of skill in the art and seed produced, for example self-pollination is commonly used with transgenic corn. The regenerated transformed plant or its progeny seed or plants can be tested for expression of the recombinant DNA and selected for the presence of enhanced agronomic trait.

### Transgenic Plants and Seeds

[0059] Transgenic plants derived from transgenic plant cells having a transgenic nucleus of this invention are grown to generate transgenic plants having an enhanced trait as compared to a control plant and produce transgenic seed and haploid pollen of this invention. Such plants with enhanced traits are identified by selection of transformed plants or progeny seed for the enhanced trait. For efficiency a selection method is designed to evaluate multiple transgenic plants (events) comprising the recombinant DNA, for example multiple plants from 2 to 20 or more transgenic events. Transgenic plants grown from transgenic seed provided herein demonstrate improved agronomic traits that contribute to increased yield or other trait that provides increased plant value, including, for example, improved seed quality. Of particular interest are plants having enhanced water use efficiency, enhanced cold tolerance, increased yield, enhanced nitrogen use efficiency, enhanced seed protein and enhanced seed oil.

[0060] Table 1 provides a list of protein encoding DNA (“genes”) and miRNAs that are useful in the production of transgenic plants with enhanced agronomic trait. The elements of Table 1 are described by reference to:

[0061] “PEP SEQ ID NO” identifies an amino acid sequence from SEQ ID NO: 16 to 21.

[0062] “NUC SEQ ID NO” identifies a nucleotide sequence from SEQ ID NO:1 to 15.

[0063] “EXP SEQ ID NO” identifies an exemplary DNA sequence of SEQ ID NOs: 1128 to 1140 used to produce a desired change in an identified miRNA or protein.

[0064] “Gene/miRNA ID” refers to an arbitrary identifier.

[0065] “Gene/miRNA Name” denotes a common name for the protein or miRNA encoded by the recombinant DNA.

[0066] “Annotation” refers to a description of the top hit protein obtained from an amino acid sequence query of each PEP SEQ ID NO to GENBANK database of the National Center for Biotechnology Information (ncbi).

TABLE 1

| NUC | PEP | EXP | | | |
|---|---|---|---|---|---|
| SEQ | SEQ | SEQ | | | |
| ID | ID | ID | Gene/miRNA | Gene/miRNA | |
| NO | NO | NO | ID | Name | Annotation |
| 1 | | 1128 | Mnom000623 | mir319 | |
| 2 | | | Mnom000624- | mir171 | |
| | | | Mnom000625 | | |
| 3 | 16 | 1129 | Mnom000630- | ZmGw2 | RING-type E3 |
| | | | Mnom000632 | | ubiquitin ligase |
| | | | | | [Oryza sativa |
| | | | | | (indica cultivar- |
| | | | | | group)] |
| 4 | 17 | 1130 | Mnom000891 | ZmHB4 | Homeodomain |
| | | | | | transcription |
| | | | | | factor HOX17 |
| 5 | 18 | 1131 | Mnom000894- | ANR1 | MADS-box |
| | | | Mnom000895 | | transcription |
| | | | | factor 25 | |
| 6 | 19 | 1132 | Mnom000896 | LG1 | LG1_MAIZE |
| | | | | | Protein |
| | | | | | LIGULELESS 1 |
| 7 | | 1133 | Mnom000897 | mir444 | |
| 8 | 20 | 1134 | Mnom000945, | SBP | squamosa |
| | | | Mnom001799- | | promoter-binding |
| | | | Mnom001803 | | protein-like 11 |
| 9 | | 1135 | Mnom001247- | mir393 | |
| | | | Mnom001248 | | |
| 10 | | 1136 | Mnom001249- | mir398 | |
| | | | Mnom001250 | | |
| 11 | | 1137 | Mnom001249- | mir408 | |
| | | | Mnom001250 | | |
| 12 | | 1138 | Mnom001249- | mir528 | |
| | | | Mnom001250 | | |
| 13 | | 1139 | Mnom001251- | mir169g | |
| | | | Mnom001252 | | |
| 14 | 21 | | Mnom001677 | IPS | 2-isopropylmalate |
| | | | | | synthase B, |
| | | | | | putative, |
| | | | | | expressed |
| 15 | | 1140 | Mnom001804- | mir397 | |
| | | | Mnom001805, | | |
| | | | Mnom001816- | | |
| | | | Mnom001817 | | |

Selection Methods for Transgenic Plants with Enhanced Agronomic Trait

[0067] Within a population of transgenic plants each regenerated from a plant cell having a nucleus with recombinant DNA many plants that survive to fertile transgenic plants that produce seeds and progeny plants will not exhibit an enhanced agronomic trait. Selection from the population is necessary to identify one or more transgenic plant cells having a transgenic nucleus that can provide plants with the enhanced trait. Transgenic plants having enhanced traits are selected from populations of plants regenerated or derived from plant cells transformed as described herein by evaluating the plants in a variety of assays to detect an enhanced trait, e.g. enhanced water use efficiency, enhanced cold tolerance, increased yield, enhanced nitrogen use efficiency, enhanced seed protein and enhanced seed oil. These assays also may take many forms including, but not limited to, direct screening for the trait in a greenhouse or field trial or by screening for a surrogate trait. Such analyses can be directed to detecting changes in the chemical composition, biomass, physiological properties, morphology of the plant. Changes in chemical compositions such as nutritional composition of grain can be detected by analysis of the seed composition and content of protein, free amino acids, oil, free fatty acids, starch or tocopherols. Changes in biomass characteristics can be made on greenhouse or field grown plants and can include plant height, stem diameter, root and shoot dry weights; and, for corn plants, ear length and diameter. Changes in physiological properties can be identified by evaluating responses to stress conditions, for example assays using imposed stress conditions such as water deficit, nitrogen deficiency, cold growing conditions, pathogen or insect attack or light deficiency, or increased plant density. Changes in morphology can be measured by visual observation of tendency of a transformed plant with an enhanced agronomic trait to also appear to be a normal plant as compared to changes toward bushy, taller, thicker, narrower leaves, striped leaves, knotted trait, chlorosis, albino, anthocyanin production, or altered tassels, ears or roots. Other selection properties include days to pollen shed, days to silking, leaf extension rate, chlorophyll content, leaf temperature, stand, seedling vigor, internode length, plant height, leaf number, leaf area, tillering, brace roots, stay green, stalk lodging, root lodging, plant health, barreness/prolificacy, green snap, and pest resistance. In addition, phenotypic characteristics of harvested grain may be evaluated, including number of kernels per row on the ear, number of rows of kernels on the ear, kernel abortion, kernel weight, kernel size, kernel density and physical grain quality.

[0068] Assays for screening for a desired trait are readily designed by those practicing in the art. The following illustrates useful screening assays for corn traits using hybrid corn plants. The assays can be readily adapted for screening other plants such as canola, cotton and soybean either as hybrids or inbreds.

[0069] Transgenic corn plants having nitrogen use efficiency are identified by screening in fields with three levels of nitrogen (N) fertilizer being applied, e.g. low level (0 N), medium level (80 lb/ac) and high level (180 lb/ac). Plants with enhanced nitrogen use efficiency provide higher yield as compared to control plants.

[0070] Transgenic corn plants having enhanced yield are identified by screening using progeny of the transgenic plants over multiple locations with plants grown under optimal production management practices and maximum weed and pest control. A useful target for improved yield is a 5% to 10% increase in yield as compared to yield produced by plants grown from seed for a control plant. Selection methods may be applied in multiple and diverse geographic locations, for example up to 16 or more locations, over one or more planting seasons, for example at least two planting seasons, to statistically distinguish yield improvement from natural environmental effects.

[0071] Transgenic corn plants having enhanced water use efficiency are identified by screening plants in an assay where water is withheld for period to induce stress followed by watering to revive the plants. For example, a useful selection process imposes 3 drought/re-water cycles on plants over a total period of 15 days after an initial stress free growth period of 11 days. Each cycle consists of 5 days, with no water being applied for the first four days and a water quenching on the 5th day of the cycle. The primary phenotypes analyzed by the selection method are the changes in plant growth rate as determined by height and biomass during a vegetative drought treatment.

[0072] Transgenic corn plants having enhanced cold tolerance are identified by screening plants in a cold germination assay and/or a cold tolerance field trial. In a cold germination assay trays of transgenic and control seeds are placed in a growth chamber at 9.7° C. for 24 days (no light). Seeds having higher germination rates as compared to the control are identified as having enhanced cold tolerance. In a cold tolerance field trial plants with enhanced cold tolerance are identified from field planting at an earlier date than conventional Spring planting for the field location. For example, seeds are planted into the ground around two weeks before local farmers begin to plant corn so that a significant cold stress is exerted onto the crop, named as cold treatment. Seeds also are planted under local optimal planting conditions such that the crop has little or no exposure to cold condition, named as normal treatment. At each location, seeds are planted under both cold and normal conditions preferably with multiple repetitions per treatment.

[0073] Transgenic corn plants having seeds with increased protein and/or oil levels are identified by analyzing progeny seed for protein and/or oil. Near-infrared transmittance spectrometry is a non-destructive, high-throughput method that is useful to determine the composition of a bulk seed sample for properties listed in table 2.

TABLE 2

| | |
|---|---|
| Typical sample(s): | Whole grain corn and soybean seeds |
| Typical analytical range: | Corn - moisture 5-15%, oil 5-20%, protein |
| | 5-30%, starch 50-75%, and density 1.0-1.3%. |
| | Soybean - moisture 5-15%, oil 15-25%, |
| | and protein 35-50%. |

[0074] Although the plant cells and methods of this invention can be applied to any plant cell, plant, seed or pollen, e.g. any fruit, vegetable, grass, tree or ornamental plant, the various aspects of the invention are preferably applied to corn, soybean, cotton, canola, alfalfa, wheat, rice, sugarcane, and sugarbeat plants. In many cases the invention is applied to corn plants that are inherently resistant to disease from the Mal de Rio Cuarto virus or the Puccina sorghi fungus or both.

[0075] The following examples are included to demonstrate aspects of the invention, those of skill in the art should, in light of the present disclosure, appreciate that many changes can be made in the specific aspects which are disclosed and still obtain a like or similar results without departing from the spirit and scope of the invention.

### EXAMPLE 1

### Plant Expression Constructs

[0076] This example illustrates the construction of plasmids for transferring recombinant DNA into a plant cell nucleus that can be regenerated into transgenic plants.

### A. Plant Expression Constructs for Corn Transformation

[0077] A base corn transformation vector pMON93039, as set forth in SEQ ID NO:22, illustrated in Table 3, is fabricated for use in preparing recombinant DNA for Agrobacterium-mediated transformation into corn tissue.

TABLE 3

| | | | Coordinates of |
|---|---|---|---|
| Function | Name | Annotation | SEQ ID NO: 22 |
| Agrobacterium | B-AGRtu.right border | Agro right border sequence, | 11364-11720 |
| T-DNA transfer | | essential for transfer of T-DNA. | |
| Gene of interest | E-Os.Act1 | Upstream promoter region of the | 19-775 |
| expression | | rice actin 1 gene | |
| cassette | E-CaMV.35S.2xA1- | Duplicated35S A1-B3 domain | 788-1120 |
| | B3 | without TATA box | |
| | P-Os.Act1 | Promoter region of the rice actin 1 | 1125-1204 |
| | | gene | |
| | L-Ta.Lhcb1 | 5′ untranslated leader of wheat | 1210-1270 |
| | | major chlorophyll a/b binding | |
| | | protein | |
| | I-Os.Act1 | First intron and flanking UTR exon | 1287-1766 |
| | | sequences from the rice actin 1 | |
| | | gene | |
| | T-St.Pis4 | 3′ non-translated region of the | 1838-2780 |
| | | potato proteinase inhibitor II gene | |
| | | which functions to direct | |
| | | polyadenylation of the mRNA | |
| Plant selectable | P-Os.Act1 | Promoter from the rice actin 1 gene | 2830-3670 |
| marker | L-Os.Act1 | First exon of the rice actin 1 gene | 3671-3750 |
| expression | I-Os.Act1 | First intron and flanking UTR exon | 3751-4228 |
| cassette | | sequences from the rice actin 1 | |
| | | gene | |
| | TS-At.ShkG-CTP2 | Transit peptide region of | 4238-4465 |
| | | Arabidposis EPSPS | |
| | CR-AGRtu.aroA- | Coding region for bacterial strain | 4466-5833 |
| | CP4.nat | CP4 native aroA gene. | |
| | T-AGRtu.nos | A 3′ non-translated region of the | 5849-6101 |
| | | nopaline synthase gene of | |
| | | Agrobacterium tumefaciens Ti | |
| | | plasmid which functions to direct | |
| | | polyadenylation of the mRNA. | |
| Agrobacterium | B-AGRtu.left border | Agro left border sequence, essential | 6168-6609 |
| T-DNA transfer | | for transfer of T-DNA. | |
| Maintenance in | OR-Ec.oriV-RK2 | The vegetative origin of replication | 6696-7092 |
| E. coli | | from plasmid RK2. | |
| | CR-Ec.rop | Coding region for repressor of | 8601-8792 |
| | | primer from the ColE1 plasmid. | |
| | | Expression of this gene product | |
| | | interferes with primer binding at the | |
| | | origin of replication, keeping | |
| | | plasmid copy number low. | |
| | OR-Ec.ori-ColE1 | The minimal origin of replication | 9220-9808 |
| | | from the E. coli plasmid ColE1. | |
| | P-Ec.aadA-SPC/STR | Promoter for Tn7 | 10339-10380 |
| | | adenylyltransferase (AAD(3″)) | |
| | CR-Ec.aadA- | Coding region for Tn7 | 10381-11169 |
| | SPC/STR | adenylyltransferase (AAD(3″)) | |
| | | conferring spectinomycin and | |
| | | streptomycin resistance. | |
| | T-Ec.aadA-SPC/STR | 3′ UTR from the Tn7 | 11170-11227 |
| | | adenylyltransferase (AAD(3″)) | |
| | | gene of E. coli. | |

[0078] To construct transformation vectors for expressing a protein identified in Table 1, primers for PCR amplification of the protein coding nucleotides are designed at or near the start and stop codons of the coding sequence, in order to eliminate most of the 5′ and 3′ untranslated regions. The protein coding nucleotides are inserted into the base vector in the gene of interest expression cassette at an insertion site, i.e. between the intron element (coordinates 1287-1766) and the polyadenylation element (coordinates 1838-2780).

[0079] To construct transformation vectors for suppressing a protein identified in Table 1, the amplified protein coding nucleotides are assembled in a sense and antisense arrangement and inserted into the base vector at the insertion site in the gene of interest expression cassette to provide transcribed RNA that will form a double-stranded RNA for RNA interference suppression of the protein. In the embodiments of this invention the proteins that are suppressed are ZmGw2, ZmHB4, LG1, and IPS.

### B. Plant Expression Constructs for Soy and Canola Transformation

[0080] Vectors for use in transformation of soybean and canola tissue are prepared having the elements of expression vector pMON82053 (SEQ ID NO: 23) as shown in Table 4 below.

TABLE 4

| | | | Coordinates of |
|---|---|---|---|
| Function | Name | Annotation | SEQ ID NO: 23 |
| Agrobacterium T- | B-AGRtu.left border | Agro left border sequence, essential for | 6144-6585 |
| DNA transfer | | transfer of T-DNA. | |
| Plant selectable | P-At.Act7 | Promoter from the Arabidposis actin 7 gene | 6624-7861 |
| marker expression | L-At.Act7 | 5′UTR of Arabidposis Act7 gene | |
| cassette | I-At.Act7 | Intron from the Arabidposis actin7 gene | |
| | TS-At.ShkG-CTP2 | Transit peptide region of Arabidopsis | 7864-8091 |
| | | EPSPS | |
| | CR-AGRtu.aroA- | Synthetic CP4 coding region with dicot | 8092-9459 |
| | CP4.nno_At | preferred codon usage. | |
| | T-AGRtu.nos | A 3′ non-translated region of the nopaline | 9466-9718 |
| | | synthase gene of Agrobacterium | |
| | | tumefaciens Ti plasmid which functions to | |
| | | direct polyadenylation of the mRNA. | |
| Gene of interest | P-CaMV.35S-enh | Promoter for 35S RNA from CaMV | 1-613 |
| expression cassette | | containing a duplication of the −90 to −350 | |
| | | region. | |
| | T-Gb.E6-3b | 3′ untranslated region from the fiber protein | 688-1002 |
| | | E6 gene of sea-island cotton. | |
| Agrobacterium T- | B-AGRtu.right | Agro right border sequence, essential for | 1033-1389 |
| DNA transfer | border | transfer of T-DNA. | |
| Maintenance in E. coli | OR-Ec.oriV-RK2 | The vegetative origin of replication from | 5661-6057 |
| | | plasmid RK2. | |
| | CR-Ec.rop | Coding region for repressor of primer from | 3961-4152 |
| | | the ColE1 plasmid. Expression of this gene | |
| | | product interferes with primer binding at the | |
| | | origin of replication, keeping plasmid copy | |
| | | number low. | |
| | OR-Ec.ori-ColE1 | The minimal origin of replication from the | 2945-3533 |
| | | E. coli plasmid ColE1. | |
| | P-Ec.aadA-SPC/STR | Promoter for Tn7 adenylyltransferase | 2373-2414 |
| | | (AAD(3″)) | |
| | CR-Ec.aadA- | Coding region for Tn7 adenylyltransferase | 1584-2372 |
| | SPC/STR | (AAD(3″)) conferring spectinomycin and | |
| | | streptomycin resistance. | |
| | T-Ec.aadA-SPC/STR | 3′ UTR from the Tn7 adenylyltransferase | 1526-1583 |
| | | (AAD(3″)) gene of E. coli. | |

[0081] To construct transformation vectors for expressing a protein identified Table 1 primers for PCR amplification of the protein coding nucleotides are designed at or near the start and stop codons of the coding sequence, in order to eliminate most of the 5′ and 3′ untranslated regions. The protein coding nucleotides are inserted into the base vector in the gene of interest expression cassette at an insertion site, i.e. between the promoter element (coordinates 1-613) and the polyadenylation element (coordinates 688-1002).

[0082] To construct transformation vectors for suppressing a protein identified Table 1 the amplified protein coding nucleotides are assembled in a sense and antisense arrangement and inserted into the base vector at the insertion site in the gene of interest expression cassette to provide transcribed RNA that will form a double-stranded RNA for RNA interference suppression of the protein. In the embodiments of this invention the proteins that are suppressed are ZmGw2, ZmHB4, LG1, and IPS.

### C. Cotton Transformation Vector

[0083] Plasmids for use in transformation of cotton tissue are prepared with elements of expression vector pMON99053 (SEQ ID NO: 24) as shown in Table 5 below.

TABLE 5

| | | | Coordinates of |
|---|---|---|---|
| Function | Name | Annotation | SEQ ID NO: 24 |
| Agrobacterium T- | B-AGRtu.right border | Agro right border sequence, | 1-357 |
| DNA transfer | | essential for transfer of T-DNA. | |
| Gene of interest | Exp-CaMV.35S- | Enhanced version of the 35S RNA | 388-1091 |
| expression | enh + Ph.DnaK | promoter from CaMV plus the | |
| cassette | | petunia hsp70 5′ untranslated region | |
| | T-Ps.RbcS2-E9 | The 3′ non-translated region of the | 1165-1797 |
| | | pea RbcS2 gene which functions to | |
| | | direct polyadenylation of the | |
| | | mRNA. | |
| Plant selectable | Exp-CaMV.35S | Promoter and 5′ untranslated region | 1828-2151 |
| marker expression | | from the 35S RNA of CaMV | |
| cassette | CR-Ec.nptII-Tn5 | Coding region for neomycin | 2185-2979 |
| | | phosphotransferase gene from | |
| | | transposon Tn5 which confers | |
| | | resistance to neomycin and | |
| | | kanamycin. | |
| | T-AGRtu.nos | A 3′ non-translated region of the | 3011-3263 |
| | | nopaline synthase gene of | |
| | | Agrobacterium tumefaciens Ti | |
| | | plasmid which functions to direct | |
| | | polyadenylation of the mRNA. | |
| Agrobacterium T- | B-AGRtu.left border | Agro left border sequence, essential | 3309-3750 |
| DNA transfer | | for transfer of T-DNA. | |
| Maintenance in E. coli | OR-Ec.oriV-RK2 | The vegetative origin of replication | 3837-4233 |
| | | from plasmid RK2. | |
| | CR-Ec.rop | Coding region for repressor of | 5742-5933 |
| | | primer from the ColE1 plasmid. | |
| | | Expression of this gene product | |
| | | interferes with primer binding at the | |
| | | origin of replication, keeping | |
| | | plasmid copy number low. | |
| | OR-Ec.ori-ColE1 | The minimal origin of replication | 6361-6949 |
| | | from the E. coli plasmid ColE1. | |
| | P-Ec.aadA-SPC/STR | Promoter for Tn7 | 7480-7521 |
| | | adenylyltransferase (AAD(3″)) | |
| | CR-Ec.aadA-SPC/STR | Coding region for Tn7 | 7522-8310 |
| | | adenylyltransferase (AAD(3″)) | |
| | | conferring spectinomycin and | |
| | | streptomycin resistance. | |
| | T-Ec.aadA-SPC/STR | 3′ UTR from the Tn7 | 8311-8368 |
| | | adenylyltransferase (AAD(3″)) gene | |
| | | of E. coli. | |

[0084] To construct transformation vectors for expressing a protein identified Table 1 primers for PCR amplification of the protein coding nucleotides are designed at or near the start and stop codons of the coding sequence, in order to eliminate most of the 5′ and 3′ untranslated regions. The protein coding nucleotides are inserted into the base vector in the gene of interest expression cassette at an insertion site, i.e. between the promoter element (coordinates 388-1091) and the polyadenylation element (coordinates 1165-1791).

[0085] To construct transformation vectors for suppressing a protein identified Table 1 the amplified protein coding nucleotides are assembled in a sense and antisense arrangement and inserted into the base vector at the insertion site in the gene of interest expression cassette to provide transcribed RNA that will form a double-stranded RNA for RNA interference suppression of the protein. In the embodiments of this invention the proteins that are suppressed are ZmGw2, ZmHB4, LG1, and IPS.

### EXAMPLE 2

### Corn Transformation

[0086] This example illustrates transformation methods useful in producing a transgenic nucleus in a corn plant cell, and the plants, seeds and pollen produced from a transgenic cell with such a nucleus having an enhanced trait, i.e. enhanced water use efficiency, enhanced cold tolerance, increased yield, enhanced nitrogen use efficiency, enhanced seed protein and enhanced seed oil. A plasmid vector is prepared by cloning the DNA of SEQ ID NO:3 into the gene of interest expression cassette in the base vector for use in corn transformation of corn tissue provided in Example 1, Table 3.

[0087] For Agrobacterium-mediated transformation of corn embryo cells corn plants of a readily transformable line are grown in the greenhouse and ears are harvested when the embryos are 1.5 to 2.0 mm in length. Ears are surface sterilized by spraying or soaking the ears in 80% ethanol, followed by air drying Immature embryos are isolated from individual kernels on surface sterilized ears. Prior to inoculation of maize cells, Agrobacterium cells are grown overnight at room temperature Immature maize embryo cells are inoculated with Agrobacterium shortly after excision, and incubated at room temperature with Agrobacterium for 5-20 minutes. Immature embryo plant cells are then co-cultured with Agrobacterium for 1 to 3 days at 23° C. in the dark. Co-cultured embryos are transferred to selection media and cultured for approximately two weeks to allow embryogenic callus to develop. Embryogenic callus is transferred to culture medium containing 100 mg/L paromomycin and subcultured at about two week intervals. Transformed plant cells are recovered 6 to 8 weeks after initiation of selection.

[0088] For Agrobacterium-mediated transformation of maize callus immature embryos are cultured for approximately 8-21 days after excision to allow callus to develop. Callus is then incubated for about 30 minutes at room temperature with the Agrobacterium suspension, followed by removal of the liquid by aspiration. The callus and Agrobacterium are co-cultured without selection for 3-6 days followed by selection on paromomycin for approximately 6 weeks, with biweekly transfers to fresh media. Paromomycin resistant calli are identified about 6-8 weeks after initiation of selection.

[0089] To regenerate transgenic corn plants a callus of transgenic plant cells resulting from transformation and selection is placed on media to initiate shoot development into plantlets which are transferred to potting soil for initial growth in a growth chamber at 26° C. followed by a mist bench before transplanting to 5 inch pots where plants are grown to maturity. The regenerated plants are self-fertilized and seed is harvested for use in one or more methods to select seeds, seedlings or progeny second generation transgenic plants (R2 plants) or hybrids, e.g. by selecting transgenic plants exhibiting an enhanced trait as compared to a control plant.

[0090] The above process is repeated to produce multiple events of transgenic corn plant cells that are transformed with recombinant DNA from each of the genes identified in Table 1. Events are designed to produce in the transgenic cells one of the proteins identified in Table 1, except the proteins of SEQ ID NOs:16, 17, 19, and 21 which are suppressed. Progeny transgenic plants and seed of the transformed plant cells are screened for enhanced water use efficiency, enhanced cold tolerance, increased yield, enhanced nitrogen use efficiency, enhanced seed protein and enhanced seed oil. From each group of multiple events of transgenic plants with a specific recombinant DNA from Table 1 the event that produces the greatest enhancement in yield, water use efficiency, nitrogen use efficiency, enhanced cold tolerance, enhanced seed protein and enhanced seed oil is identified and progeny seed is selected for commercial development.

### EXAMPLE 3

### Soybean Transformation

[0091] This example illustrates plant transformation useful in producing a transgenic nucleus in a soybean plant cell, and the plants, seeds and pollen produced from a transgenic cell with such a nucleus having an enhanced trait, i.e. enhanced water use efficiency, enhanced cold tolerance, increased yield, enhanced nitrogen use efficiency, enhanced seed protein and enhanced seed oil.

[0092] For Agrobacterium mediated transformation, soybean seeds are imbided overnight and the meristem explants excised. The explants are placed in a wounding vessel. Soybean explants and induced Agrobacterium cells from a strain containing plasmid DNA with the gene of interest cassette and a plant selectable marker cassette are mixed no later than 14 hours from the time of initiation of seed imbibition, and wounded using sonication. Following wounding, explants are placed in co-culture for 2-5 days at which point they are transferred to selection media for 6-8 weeks to allow selection and growth of transgenic shoots. Resistant shoots are harvested approximately 6-8 weeks and placed into selective rooting media for 2-3 weeks. Shoots producing roots are transferred to the greenhouse and potted in soil. Shoots that remain healthy on selection, but do not produce roots are transferred to non-selective rooting media for an additional two weeks. Roots from any shoots that produce roots off selection are tested for expression of the plant selectable marker before they are transferred to the greenhouse and potted in soil.

[0093] The above process is repeated to produce multiple events of transgenic soybean plant cells that are transformed with recombinant DNA from each of the genes identified in Table 1. Events are designed to produce in the transgenic cells one of the proteins identified in Table 1, except the proteins of SEQ ID NOs:16, 17, 19, and 21 which are suppressed. Progeny transgenic plants and seed of the transformed plant cells are screened for enhanced water use efficiency, enhanced cold tolerance, increased yield, enhanced seed protein and enhanced seed oil. From each group of multiple events of transgenic plants with a specific recombinant DNA from Table 1 the event that produces the greatest enhancement in yield, water use efficiency, nitrogen use efficiency, enhanced cold tolerance, enhanced seed protein and enhanced seed oil is identified and progeny seed is selected for commercial development.

### EXAMPLE 4

### Cotton Transgenic Plants with Enhanced Agronomic Traits

[0094] This example illustrates plant transformation useful in producing a transgenic nucleus in a cotton plant cell, and the plants, seeds and pollen produced from a transgenic cell with such a nucleus having an enhanced trait, i.e. enhanced water use efficiency, increased yield, enhanced nitrogen use efficiency and enhanced seed oil.

[0095] Transgenic cotton plants containing each recombinant DNA having a sequence of SEQ ID NO: 3-6, 8, and 14 are obtained by transforming with recombinant DNA from each of the genes identified in Table 1 using Agrobacterium-mediated tranformation. The above process is repeated to produce multiple events of transgenic cotton plant cells that are transformed with recombinant DNA from each of the genes identified in Table 1. Events are designed to produce in the transgenic cells one of the proteins identified in Table 1, except the proteins of SEQ ID NOs:16, 17, 19, and 21 which are suppressed.

[0096] From each group of multiple events of transgenic plants with a specific recombinant DNA from Table 1 the event that produces the greatest enhancement in yield, water use efficiency, nitrogen use efficiency, enhanced cold tolerance, enhanced seed protein and enhanced seed oil is identified and progeny seed is selected for commercial development.

[0097] Progeny transgenic plants are selected from a population of transgenic cotton events under specified growing conditions and are compared with control cotton plants. Control cotton plants are substantially the same cotton genotype but without the recombinant DNA, for example, either a parental cotton plant of the same genotype that was not transformed with the identical recombinant DNA or a negative isoline of the transformed plant. Additionally, a commercial cotton cultivar adapted to the geographical region and cultivation conditions, i.e. cotton variety ST474, cotton variety FM 958, and cotton variety Siokra L-23, are used to compare the relative performance of the transgenic cotton plants containing the recombinant DNA.

[0098] Transgenic cotton plants with enhanced yield and water use efficiency are identified by growing under variable water conditions. Specific conditions for cotton include growing a first set of transgenic and control plants under “wet” conditions, i.e. irrigated in the range of 85 to 100 percent of evapotranspiration to provide leaf water potential of −14 to −18 bars, and growing a second set of transgenic and control plants under “dry” conditions, i.e. irrigated in the range of 40 to 60 percent of evapotranspiration to provide a leaf water potential of −21 to −25 bars. Pest control, such as weed and insect control is applied equally to both wet and dry treatments as needed. Data gathered during the trial includes weather records throughout the growing season including detailed records of rainfall; soil characterization information; any herbicide or insecticide applications; any gross agronomic differences observed such as leaf morphology, branching habit, leaf color, time to flowering, and fruiting pattern; plant height at various points during the trial; stand density; node and fruit number including node above white flower and node above crack boll measurements; and visual wilt scoring. Cotton boll samples are taken and analyzed for lint fraction and fiber quality. The cotton is harvested at the normal harvest timeframe for the trial area. Enhanced water use efficiency is indicated by increased yield, improved relative water content, enhanced leaf water potential, increased biomass, enhanced leaf extension rates, and improved fiber parameters.

### EXAMPLE 5

### Canola Transformation

[0099] This example illustrates plant transformation useful in producing the transgenic canola plants of this invention and the production and identification of transgenic seed for transgenic canola having enhanced water use efficiency, enhanced cold tolerance, increased yield, enhanced nitrogen use efficiency, enhanced seed protein and enhanced seed oil.

[0100] Tissues from in vitro grown canola seedlings are prepared and inoculated with overnight-grown Agrobacterium cells containing plasmid DNA with the gene of interest cassette and a plant selectable marker cassette. Following co-cultivation with Agrobacterium, the infected tissues are allowed to grow on selection to promote growth of transgenic shoots, followed by growth of roots from the transgenic shoots. The selected plantlets are then transferred to the greenhouse and potted in soil. Molecular characterization are performed to confirm the presence of the gene of interest, and its expression in transgenic plants and progenies. Progeny transgenic plants are selected from a population of transgenic canola events under specified growing conditions and are compared with control canola plants. Control canola plants are substantially the same canola genotype but without the recombinant DNA, for example, either a parental canola plant of the same genotype that is not transformed with the identical recombinant DNA or a negative isoline of the transformed plant

[0101] Transgenic canola plant cells are transformed with recombinant DNA from each of the genes identified in Table 1. The above process is repeated to produce multiple events of transgenic soybean plant cells that are transformed with recombinant DNA from each of the genes identified in Table 1. Events are designed to produce in the transgenic cells one of the proteins identified in Table 1, except the proteins of SEQ ID NOs:16, 17, 19, and 21 which are suppressed. Progeny transgenic plants and seed of the transformed plant cells are screened for enhanced water use efficiency, enhanced cold tolerance, increased yield, enhanced seed protein and enhanced seed oil. From each group of multiple events of transgenic plants with a specific recombinant DNA from Table 1 the event that produces the greatest enhancement in yield, water use efficiency, nitrogen use efficiency, enhanced cold tolerance, enhanced seed protein and enhanced seed oil is identified and progeny seed is selected for commercial development.

### EXAMPLE 6

### Identification of Homologous Proteins

[0102] This example illustrates the identification of homologs of proteins encoded by the DNA identified in Table 1 which is used to provide transgenic seed and plants having enhanced agronomic traits. From the sequence of the homologs, homologous DNA sequence can be identified for preparing additional transgenic seeds and plants of this invention with enhanced agronomic traits.

[0103] An “All Protein Database” was constructed of known protein sequences using a proprietary sequence database and the National Center for Biotechnology Information (NCBI) non-redundant amino acid database (nr.aa). For each organism from which a polynucleotide sequence provided herein was obtained, an “Organism Protein Database” was constructed of known protein sequences of the organism; it is a subset of the All Protein Database based on the NCBI taxonomy ID for the organism.

[0104] The All Protein Database was queried using amino acid sequences provided herein as SEQ ID NO: 16 through SEQ ID NO: 21 using NCBI “blastp” program with E-value cutoff of 1e-8. Up to 1000 top hits were kept, and separated by organism names. For each organism other than that of the query sequence, a list was kept for hits from the query organism itself with a more significant E-value than the best hit of the organism. The list contains likely duplicated genes of the polynucleotides provided herein, and is referred to as the Core List. Another list was kept for all the hits from each organism, sorted by E-value, and referred to as the Hit List.

[0105] The Organism Protein Database was queried using polypeptide sequences provided herein as SEQ ID NO: 16 through SEQ ID NO: 21 using NCBI “blastp” program with E-value cutoff of 1e-4. Up to 1000 top hits were kept. A BLAST searchable database is constructed based on these hits, and is referred to as “SubDB”. SubDB was queried with each sequence in the Hit List using NCBI “blastp” program with E-value cutoff of 1e-8. The hit with the best E-value was compared with the Core List from the corresponding organism. The hit was deemed a likely ortholog if it belongs to the Core List, otherwise it was deemed not a likely ortholog and there was no further search of sequences in the Hit List for the same organism. Homologs from a large number of distinct organisms were identified and are reported below in table 6 with the SEQ ID NO of the original protein query sequence and the identified homologs as [SEQ ID NO]: [Homolog SEQ ID NOs].

TABLE 6
16: 25 26 27 28 29 30 31 32 33 34 35 36 37 38 39 40 41 42 43 44 45 46 47 48 49 50 51 52
53 54 55 56 57 58
17: 75 77 79 80 82 91 92 93 96 98 100 101 107 117 128 142 143 145 162 170 179 183 201
206 209 213 222 244 249 278 280 335 336 337 338 339 340 341 342 343 344 345 384 415
423 424 425 426 427 446 457 458 471 477 497 499 530 557 569 620 621 622 678 679 686
806 825 852 854 855 856 857 874
18: 64 65 66 67 68 72 73 81 83 85 88 99 122 134 150 173 181 198 221 237 241 250 259 260
264 324 325 326 329 334 375 386 395 400 402 403 440 441 442 449 492 493 504 508 509
521 522 523 554 555 561 572 579 580 581 582 584 589 591 592 593 599 603 604 608 632
634 639 640 641 642 643 691 692 717 733 734 766 768 774 778 790 791 835 836 842 847
851 861 875
19: 78 105 131 174 193 202 220 223 304 305 306 307 308 309 310 312 313 314 315 316
317 318 319 320 405 489 498 529 558 741 746 747 748 749 750 751 752 753 754 755 756
822
20: 63 84 97 106 108 110 111 112 113 114 120 123 127 129 130 132 135 136 138 139 140
141 175 193 210 211 218 219 245 246 279 281 282 306 307 308 315 322 350 353 389 404
405 437 478 481 482 484 485 486 488 494 496 505 515 526 527 528 532 560 636 675 746
747 748 749 750 751 752 753 754 755 756 765 769 822 880 881
21: 59 60 61 62 69 70 71 74 76 86 87 89 90 94 95 102 103 104 109 115 116 118 119 121
124 125 126 133 137 144 146 147 148 149 151 152 153 154 155 156 157 158 159 160 161
163 164 165 166 167 168 169 171 172 176 177 178 180 182 184 185 186 187 188 189 190
191 192 194 195 196 197 199 200 203 204 205 207 208 212 214 215 216 217 224 225 226
227 228 229 230 231 232 233 234 235 236 238 239 240 242 243 247 248 251 252 253 254
255 256 257 258 261 262 263 265 266 267 268 269 270 271 272 273 274 275 276 277 283
284 285 286 287 288 289 290 291 292 293 294 295 296 297 298 299 300 301 302 303 311
321 323 327 328 330 331 332 333 346 347 348 349 351 352 354 355 356 357 358 359 360
361 362 363 364 365 366 367 368 369 370 371 372 373 374 376 377 378 379 380 381 382
383 385 387 388 390 391 392 393 394 396 397 398 399 401 406 407 408 409 410 411 412
413 414 416 417 418 419 420 421 422 428 429 430 431 432 433 434 435 436 438 439 443
444 445 447 448 450 451 452 453 454 455 456 459 460 461 462 463 464 465 466 467 468
469 470 472 473 474 475 476 479 480 483 487 490 491 495 500 501 502 503 506 507 510
511 512 513 514 516 517 518 519 520 524 525 531 533 534 535 536 537 538 539 540 541
542 543 544 545 546 547 548 549 550 551 552 553 556 559 562 563 564 565 566 567 568
570 571 573 574 575 576 577 578 583 585 586 587 588 590 594 595 596 597 598 600 601
602 605 606 607 609 610 611 612 613 614 615 616 617 618 619 623 624 625 626 627 628
629 630 631 633 635 637 638 644 645 646 647 648 649 650 651 652 653 654 655 656 657
658 659 660 661 662 663 664 665 666 667 668 669 670 671 672 673 674 676 677 680 681
682 683 684 685 687 688 689 690 693 694 695 696 697 698 699 700 701 702 703 704 705
706 707 708 709 710 711 712 713 714 715 716 718 719 720 721 722 723 724 725 726 727
728 729 730 731 732 735 736 737 738 739 740 742 743 744 745 757 758 759 760 761 762
763 764 767 770 771 772 773 775 776 777 779 780 781 782 783 784 785 786 787 788 789
792 793 794 795 796 797 798 799 800 801 802 803 804 805 807 808 809 810 811 812 813
814 815 816 817 818 819 820 821 823 824 826 827 828 829 830 831 832 833 834 837 838
839 840 841 843 844 845 846 848 849 850 853 858 859 860 862 863 864 865 866 867 868
869 870 871 872 873 876 877 878 879 882 883 884 885 886 887 888 889 890 891 892 893
894

### EXAMPLE 7

### Identification of Homologous miRNAs

[0106] ESTs were compared with the miRNAs of table 1. If an EST had a homolog region with ≦3 mismatches to a miRNA of table 1, then a subsequence of the EST of ˜230 nt with the homolog region at 5′ or 3′ end was predicted for stable secondary structure using RNAfold in EMBOSS package. A sequence was identified as a homologous miRNA if the secondary structure is typical for a pre-miRNA foldback structure and the homolog region, which is the miRNA candidate, has the required complementary pairing with the opposite arm.

[0107] Due to potential errors in EST data, the predicted pre-miRNAs were compared with reference genomic sequence to validate the accuracy of the sequence. Homologs from a large number of distinct organisms were identified and are reported below in table 7 with the SEQ ID NO of the original miRNA query sequence and the identified homologs as [SEQ ID NO]: [Homolog SEQ ID NOs].

TABLE 7

| | |
|---|---|
| 1: | 895-922 |
| 2: | 923-960 |
| 7: | 961-993 |
| 9: | 994-1002 |
| 10: | 1003-1036 |
| 11: | 1037-1049 |
| 12: | 1050-1054 |
| 13: | 1055-1119 |
| 15: | 1120-1126 |

[0108] Recombinant DNA constructs are prepared using the DNA encoding each of the identified protein and miRNA homologs and the constructs are used to prepare multiple events of transgenic corn, soybean, canola and cotton plants as illustrated in Examples 2-5. Plants are regenerated from the transformed plant cells and used to produce progeny plants and seed that are screened for enhanced water use efficiency, enhanced cold tolerance, increased yield, enhanced nitrogen use efficiency, enhanced seed protein and enhanced seed oil. From each group of multiple events of transgenic plants with a specific recombinant DNA for a homolog the event that produces the greatest enhancement in yield, water use efficiency, nitrogen use efficiency, enhanced cold tolerance, enhanced seed protein and enhanced seed oil is identified and progeny seed is selected for commercial development.

### EXAMPLE 8

### Consensus Sequence

[0109] This example illustrates the identification of consensus amino acid sequence for the proteins and homologs encoded by DNA that is used to prepare the transgenic seed and plants of this invention having enhanced agronomic traits.

[0110] ClustalW program was selected for multiple sequence alignments of the amino acid sequence of SEQ ID NO: 16 and its homologs. Three major factors affecting the sequence alignments dramatically are (1) protein weight matrices; (2) gap open penalty; (3) gap extension penalty. Protein weight matrices available for ClustalW program include Blosum, Pam and Gonnet series. Those parameters with gap open penalty and gap extension penalty were extensively tested. On the basis of the test results, Blosum weight matrix, gap open penalty of 10 and gap extension penalty of 1 were chosen for multiple sequence alignment.

[0111] The consensus amino acid sequence can be used to identify DNA corresponding to the full scope of this invention that is useful in providing transgenic plants, for example corn and soybean plants with enhanced agronomic traits, for example improved nitrogen use efficiency, improved yield, improved water use efficiency and/or improved growth under cold stress, due to the expression in the plants of DNA suppressing a protein with amino acid sequence identical to the consensus amino acid sequence.

[0112] The SEQ ID NOs for the identified consensus sequences are reported in table 8 below and the full consensus sequences are provided in the attached sequence listing.

TABLE 8

| PEP SEQ ID NO | Consensus SEQ ID NO |
|---|---|
| 16 | 1127 |

### EXAMPLE 9

### Identification of Amino Acid Comain by Pfam Analysis

[0113] This example illustrates the identification of domain and domain module by Pfam analysis.

[0114] The amino acid sequence of the expressed proteins that are shown to be associated with an enhanced trait were analyzed for Pfam protein family against the current Pfam collection of multiple sequence alignments and hidden Markov models using the HMMER software. The Pfam protein domains and modules for the proteins of SEQ ID NOs: 17-21 are shown in Tables 9, 10 and 11. The Hidden Markov model databases for the identified patent families are also available from the Pfam consortium (ftp.sanger.ac.uk/pub/databases/Pfam/) allowing identification of other homologous proteins and their cognate encoding DNA to enable the full breadth of the invention for a person of ordinary skill in the art. Certain proteins are identified by a single Pfam domain and others by multiple Pfam domains. The function of the identified Pfam domains in proteins providing an enhanced trait in plants was verified by searching identified homologs for the conservation of the identified Pfam domains. The score value for the identified Pfam domains in sequences from table 1 and the minimum score value for the Pfam domain between a protein from table 1 and its identified homologs are reported below in table 9.

TABLE 9

| PEP SEQ | Pfam domain | | | | Minimum | |
|---|---|---|---|---|---|---|
| ID NO | name | Begin | Stop | Score | Score | E-value |
| 17 | Homeobox | 76 | 130 | 68.5 | 39.3 | 2.50E−17 |
| 17 | HALZ | 131 | 175 | 81.9 | 25.0 | 2.20E−21 |
| 18 | SRF-TF | 9 | 59 | 99.2 | 50.5 | 1.50E−26 |
| 18 | K-box | 75 | 172 | 79.2 | 20.9 | 1.50E−20 |
| 19 | SBP | 184 | 263 | 180.8 | 41.4 | 3.90E−51 |
| 20 | SBP | 174 | 252 | 178.8 | 41.4 | 1.50E−50 |
| 21 | HMGL-like | 84 | 366 | 352.5 | −75.3 | 8.20E−103 |
| 21 | LeuA_dimer | 459 | 604 | 180.3 | −30.8 | 5.60E−51 |

TABLE 10

| PEP SEQ ID NO | Pfam Domain Module | Position |
|---|---|---|
| 17 | Homeobox::HALZ | 76-130::131-175 |
| 18 | SRF-TF::K-box | 9-59::75-172 |
| 19 | SBP | 184-263 |
| 20 | SBP | 174-252 |
| 21 | HMGL-like::LeuA_dimer | 84-366::459-604 |

TABLE 11

| Pfam | Accession | Gathering | |
|---|---|---|---|
| domain name | number | cutoff | Domain description |
| HALZ | PF02183.10 | 18.1000; | Homeobox associated |
| | | | leucine zipper |
| HMGL-like | PF00682.11 | −82.2000; | HMGL-like |
| Homeobox | PF00046.21 | −4.1000; | Homeobox domain |
| K-box | PF01486.9 | 0.0000; | K-box region |
| LeuA_dimer | PF08502.2 | −37.5000; | LeuA allosteric (dimerisation) |
| | | | domain |
| SBP | PF03110.6 | 25.0000; | SBP domain |
| SRF-TF | PF00319.10 | 11.0000; | SRF-type transcription factor |
| | | | (DNA-binding and |
| | | | dimerisation domain) |

### EXAMPLE 10

### Enhanced Expression of Target Genes

[0115] This example illustrates monocot and dicot plant transformation to produce recombinant DNA constructs that are useful for stable integration into plant chromosomes in the nuclei of plant cells to provide transgenic plants having enhanced traits by enhancement of the expression of target genes.

[0116] Various recombinant DNA constructs for use in enhancing the expression of a protein in transgenic plants are constructed based on the nucleotide sequence of the gene for producing the protein that has the amino acid sequence of SEQ ID NOs: 18 and 20, where the DNA constructs are designed to express (a) an RNA that is a messenger RNA that is translated to the protein but does not have a native miRNA recognition site thereby allowing enhanced expression of the target gene, (b) an RNA that produces dsRNA that is targeted to a native miRNA or pre-miRNA that natively regulates the protein accumulation, thereby allowing enhanced expression of the target gene (c) an RNA that functions as a decoy for the native miRNA, thereby allowing enhanced expression of the target gene, and (d) an RNA that binds to a miRNA recognition site in the messenger RNA for the protein to interfere with miRNA regulation of the messenger RNA.

[0117] Each of the various types of recombinant DNA construct is used in transformation of a corn cell using the vector and method of Example 2 to produce multiple events of transgenic corn cell that are each regenerated into transgenic corn plants that are screened to identify that the presence of the recombinant DNA construct and its expression of RNA to enhance the expression of the protein. The population of transgenic plants from multiple transgenic events are screened to identify the transgenic plants that exhibit enhanced yield.

### EXAMPLE 11

### Use of Suppression Methods to Suppress Expression of Target Genes

[0118] This example illustrates monocot and dicot plant transformation to produce recombinant DNA constructs that are useful for stable integration into plant chromosomes in the nuclei of plant cells to provide transgenic plants having enhanced traits by suppression of the expression of target genes.

[0119] Various recombinant DNA constructs for use in suppressing the expression of a target gene in transgenic plants are constructed based on the nucleotide sequence of the gene for producing the protein that has the amino acid sequence of SEQ ID NOs: 16-17, 19, and 21, where the DNA constructs are designed to express (a) a miRNA that targets the gene for suppression, (b) an RNA that is a messenger RNA that is translated to the target protein and has a synthetic miRNA recognition site that would result in down modulation of the target protein, (c) an RNA that forms a dsRNA and which is processed into siRNAs that effect down regulation of the target protein, (d) a ssRNA that forms a ta-siRNA which results in the production of siRNAs that effect down regulation of the target protein.

[0120] Each of the various types of recombinant DNA construct is used in transformation of a corn cell using the vector and method of Example 2 to produce multiple events of transgenic corn cell that are each regenerated into transgenic corn plants that are screened to identify that the presence of the recombinant DNA construct and its expression of RNA to suppress the expression of the protein. The population of transgenic plants from multiple transgenic events are screened to identify the transgenic plants that exhibit enhanced yield.

### EXAMPLE 12

### Methods to Enhance Activity of miRNAs

[0121] This example illustrates monocot and dicot plant transformation to produce recombinant DNA constructs that are useful for stable integration into plant chromosomes in the nuclei of plant cells to provide transgenic plants having enhanced traits by enhancing the activity of miRNAs.

[0122] A recombinant DNA construct for use in enhancing the activity of a miRNA in transgenic plants are constructed based on the nucleotide sequence of a miRNA selected from SEQ ID NOs: 1, 2, and 7, where the DNA constructs are designed to express a pre-miRNA which is processed into the miRNA.

[0123] The recombinant DNA construct is used in transformation of a corn cell using the vector and method of Example 2 to produce multiple events of transgenic corn cell that are each regenerated into transgenic corn plants that are screened to identify that the presence of the recombinant DNA construct and its expression of RNA to enhance the activity of the miRNA. The population of transgenic plants from multiple transgenic events are screened to identify the transgenic plants that exhibit enhanced yield.

### EXAMPLE 13

### Use of Suppression Methods to Suppress miRNA Activity

[0124] This example illustrates monocot and dicot plant transformation to produce recombinant DNA constructs that are useful for stable integration into plant chromosomes in the nuclei of plant cells to provide transgenic plants having enhanced traits by suppressing the activity of miRNAs.

[0125] A recombinant DNA construct for use in suppressing the activity of a miRNA in transgenic plants are constructed based on the nucleotide sequence of a miRNA selected from SEQ ID NOs: 9-13 and 15, where the DNA constructs are designed to express a miRNA decoy which contains a miRNA recognition site and by binding to the miRNA, sequesters it away from target genes.

[0126] The recombinant DNA construct is used in transformation of a corn cell using the vector and method of Example 2 to produce multiple events of transgenic corn cell that are each regenerated into transgenic corn plants that are screened to identify that the presence of the recombinant DNA construct and its expression of RNA to suppress the activity of the miRNA. The population of transgenic plants from multiple transgenic events are screened to identify the transgenic plants that exhibit enhanced yield.

### EXAMPLE 14

### Suppression of LG1 in Corn Plants using a Synthetic miRNA

[0127] This example illustrates the use of a synthetic miRNA to suppress the expression of the native LG1 gene (SEQ ID NO: 19) in corn plants. A transgene comprising the synthetic miRNA of SEQ ID NO: 1132 was designed to suppress the expression of LG1 in transgenic corn plants. Suppression of LG1 in the plants produced plants with an altered (more vertical) leaf architecture relative to control plants lacking the transgene (FIG. 1).

The application's sequence listing, which the Patent Office published only in electronic form, follows.

SEQUENCE LISTING (1140 sequences)

SEQ ID NO: 1 - RNA, 20 nt, Oryza sativa
uuggacugaagggugcuccc

SEQ ID NO: 2 - RNA, 21 nt, Oryza sativa
ugauugagccgugccaauauc

SEQ ID NO: 3 - DNA, 1287 bp, Zea mays
atggggaaccggataggcgggcggcgcaagtcgggggtggaggagcggttcacgcggccgcagggtctctacgaccacaaggacatcgaccagaagaagctgcgcaagctcatcctcgaggccaagctcgcgccctgctacccgggcgccgacgacgccgcgcccggcggaggggacctcgaggagtgccccatctgcttcctgtactacccaagcctcaaccgttcaaagtgttgctcaaaggggatatgtacagagtgttttcttcaaatgaaaccaactcatactgctcgacctacacagtgcccattctgcaaaacgcctaattatgctgtggagtatcgtggtgtgaaaacaaaggaggaaaggagcatagagcagtttgaagaacagaaagtcatagaagcacagttgaggatgcgccaaaaagaactccaagatgaagaagctaaaatgagaagaaaacagggcaggtgttcttctagcagaacggtaacaccaacaacagaagttgagtatcgagatatttgcagcacatccttttcagtgccatcatatcaatgtactgagcaaggaaatgaatgctgttcatctgaaccttcatgctctagccaggctaacaggcggcctttccattctagacacaaccgtgatgataatgttgacatgaatctggagaacatgatggttatggaagcaatttggcgttccattcagcaggaacaaggacatctagtaaatcctgtttgtggcagctactttcctgtaattgagccaccatcacgtgaaaggcaggcatttcttccggctgctcctctagaaatgcctcatccaggtggatactcttgtgttgcggctttggctgagcaccagccaccaagcatggatttctcttacatggctggcagtagcacatacccagtctttgacatgatccgccgaccgtgcaacatgtctagtggaagcttgtgcagcgtcgagaacagttcactagacacctggagcgggatggcaccaaattgcagcagaggagtggtaagagaggagggagagtgctcaaccgaccactggtcggagggtgcggaggcgggaacaagctatgccggatcggacatcatggtggatgcaggggccatgcaaccgctgcctttcgctgagaatttcaccatggctccaagccacttccgcccggagagcatcgaggagcagatgatgttttccatggccgtgtcactagcagaaggtcatcatggtaggacgcaagcgcaaggtctggcatggttgtaa

SEQ ID NO: 4 - DNA, 681 bp, Zea mays
atggagagggtcgaggacttagggctcagcctcagcctcagctcgtccctcgcgtctcctcgcactcaccatgtcgccaccatgctgctacgcgctccagagaagaggttcctggagatgccactgctgctgcccgcgaagcggacgaccgaggtcaccggcgaggatggcctgcgaggcggcagcgatgaggaggacggcggctgcggcatcgacggctccaggaagaagctccggctgtccaaggaccagtccgcggtgctcgaggatagcttccgggagcacccaactctcaaccctcggcagaaggcagccttggcgcagcagctaggcctgcggccccgccaggtggaggtgtggttccagaacaggcgcgccaggacgaagctgaagcagacggaggtggactgcgagtacctgaagcgctgctgcgagacgctgacggaggagaaccggcggctgcagaaggaggtgcaggagctccgcgcgctcaagctcgtgtcgccgcacctctacatgcacatgtccccgcccaccaccctcaccatgtgcccctcctgcgagcgcgtctcctcgtccaacggcaactccgcagctgccacggcggccgcgcgcgcgcgcgccggcgccggcgccggcgccatcgtctgccacccgatcgaccgagccactagtacgtag

SEQ ID NO: 5 - DNA, 684 bp, Oryza sativa
atggggagagggaagattgccatcaagaggatcgacaacacgatgaaccggcaggtgaccttctcgaagcggcgcggcgggctgatgaagaaggcccgggagctggccatcctctgcgacgccgacgtcggcctcattgtcttctcctgcaccggccgcctctacgacttctccagctcaagcatgaaatcaataatagagcggtaccaggaggcaggagaggagcattgtcggttgctgaacccaatgtcagaggctaagttttggcagcgggaggttacaactttgaggcagcaagtgcaaaacttacaccacaacaacaggcaacttttgggagaggaaatctccaacttcacagttagagatctgcagcttctccagaaccaagttgagatgagcctacattccataagaaataaaaaggatcaacttttggcagaggagattctaaaactcaatgaaaaggggtctcttgttcaaaaggagaacagtgaacttcgcaagaagttcaacattgctcatcaacgcaacatagaattacacaagaagcttaactctggagaaagcacgtcaagtgagcaagttaccagaagctcaaaggatcccggagaatcgagtacaccccgtgattcacgtgtgtgtattgaccttgaattgagtcaaaaagaagttgaagatgaatag

SEQ ID NO: 6 - DNA, 1200 bp, Zea mays
atgatgaacctatcggctgccgccaacggccgcgacgagttccccccctacgtcgtgccgtccaacgcggccgctccgcccccttccctgctcccaaccatggagcagcagcaggagagcagcatccacagggagcatcatcagctgctgggctacaacctcgaggccaactcgctggccctcctgcccccgtccaacgccgccgccgcccaccaccacaccaccttcgccggcggccacagcccccacgacatcctccacttctacacacctcctccttccgccgcctcgcactacctcgccgccgccgccggcaacccctacagccacttagtctccgcgcccgggaccaccttccaccagacctcgtcgtcctactacccgcccgcggcggcggcgcaggccgcgcccgagtactacttccccaccctcgtcagctccgccgaggagaacatggccagcttcgccgccacgcagctcggcctcaacctcggctaccgcacctacttcccgcccagaggaggctacacgtacggccaccacccgccgcgctgccaggccgagggctgcaaggccgacctctccagcgccaagcgataccaccgtcgccacaaggtgtgcgagcaccactccaaggcgcccgtcgtcgtcaccgccggtggactgcatcagaggttctgccagcagtgcagcagattccatctgctggatgagttcgacgatgctaagaagagctgcaggaaacgcctagcggaccacaaccgccgccgccggaagtcaaagccatcggatgctgatgccggagacaagaaaagggcacatgcgaacaaagcagctgcagctaaagacaaagcagagagtagcagcaagaacatggatatcggagatgggttaggcgcacagatactgggaagtgcactcttgtccaaggaacaagatcaaaccatggatcttggagaggtggtgaaagaagcagtggatcccaaggggaaggcatcaatgcaacagcattacggcttccccttccattcgtcgtcagcaggatcttgcttcccccagacccaagccgtctccagtgataccacatccaatataggtcaagtgcaagagccaagcttagggttccaccatcagcaccaccaacacagcaacatcttgcagctcggccaggctatgtttgatctcgacttcgatcactag

SEQ ID NO: 7 - RNA, 21 nt, Zea mays
uguugucucaagcuugcugcc

SEQ ID NO: 8 - DNA, 1182 bp, Arabidopsis thaliana
atggactgcaacatggtatcttcgtcccagtgggattgggagcatttgatcatgtccaatccgtcaaggactgaagatgacagcaaacagctacctactgagtgggaaattgaaaaaggtgaaggaattgaatctatagttccacatttctcaggccttgagagagtcagtagtggctctgccaccagcttctggcacactgctgtatcgaaaagctcacagtcgacctctatcaactcatcatctcccgaagccaaacgatgcaagcttgcatcagaaagttcccctggagattcttgcagcaacatagactttgtccaggtgaaggctcccacagctctcgaggtatccgttgcctcagctgaatcagatctttgtttaaaactaggaaagcggacatactctgaagaatactggggtagaaacaataatgaaatttcagcggtttctatgaagttgttaactccatctgttgtcgctgggaaatccaaattgtgtggtcagagcatgccagtcccgcgttgccaaattgatggctgtgaactggatctctcatctgctaagggttatcatcgtaagcacaaagtctgcgaaaagcattcaaagtgcccaaaagttagcgtgagtggcctggaacgtcggttctgccaacagtgtagcaggttccatgctgtctctgaatttgatgagaagaaacgaagctgccgaaaacgtctttctcatcataatgcgaggcgtcgtaagccacaaggagtattttcaatgaatcccgagagggtgtatgatcgaagacagcatacaaatatgttgtggaatggggtgtcccttaacgcgagatctgaagaaatgtatgaatggggtaataacacttatgatacaaagcctagacaaacggaaaaaagctttactctgagcttccagagaggtaatggctctgaggaccagctggttgctagtagcagccgtatgttctctacatctcaaacctcaggtgggttcccagcaggaaagtccaagtttcaacttcatggcgaagatgtgggagaatactcaggagtcctccatgaatctcaagatatccaccgtgctctctctcttctgtcaacctcttcggatcccctggcccaaccacatgtgcagccattttctctactctgttcatatgatgttgtaccaaaatag

SEQ ID NO: 9 - RNA, 22 nt, Zea mays
uccaaagggaucgcauugaucu

SEQ ID NO: 10 - RNA, 21 nt, Zea mays
uguguucucaggucgccccug

SEQ ID NO: 11 - RNA, 21 nt, Zea mays
augcacugccucuucccuggc

SEQ ID NO: 12 - RNA, 21 nt, Zea mays
uggaaggggcaugcagaggag

SEQ ID NO: 13 - RNA, 21 nt, Zea mays
uagccaaggaugacuugccua

SEQ ID NO: 14 - DNA, 1881 bp, Zea mays
atggcgtcctcgctgctctcctcccccgctaaacccaccatcaccaccaccaccaaaacgaccccggccccaagacccgcccgctccgcccatgtccatgtcctctccgccgcccgctgcctccgcctccgcctccgcgcgtcgtcgcagcatcctccgcctccgcccaccccgcggtcgcggcggccggattacgtcccgaaccgcatcgacgaccccaactacgtgcgcatcttcgacaccacgctgcgcgacggggagcagtcgccgggcgccaccatgacgagcgcccagaagctcgtcgtcgcgcgccagctggcccgcctcggcgtcgacatcatcgaggccgggttcccggcctcctcccccgacgacctcgacgccgtgcgctccatcgccatcgaggtcggcaacccggcgccaggacccgccggggaggaggacgccgtccacgtgccggtcatctgcggcctctcgcggtgcaaccggaaggacatcgacgccgcgtgggaggccgtgcgccacgcgcgccgcccccggatccacaccttcatcgccaccagcgacattcacatgcagcataagctcaggaagacgcccgaccaggtggtcgccattgccagggagatggtggcctacgcccgcagcctcggatgcactgacgtcgagttcagccccgaggacgccggcaggtcaaatagagagttcttgtatcatattctaggggaagtcataaaagctggagctacgactctcaatatcccggacactgtcggatacaatcttccttatgaatttggaaagttgattgctgatataaaggcaaacactcctggaattgaaaaggctatcatttccactcattgtcagaatgaccttggtcttgcgactgccaacacactagcgggcgctcgtgcaggagcacggcagttagaggttactattaatggtattggtgaaagggctggaaatgcttctttggaggaggttgtcatggcaattaaatgccgcagagaactgttagatggtctctatactggaatcgattcccgacatatcactttgacgagcaaaatggtgcaagagcatagtggacttcacgtgcagccacataaagctattgttggtgccaatgcgttcgctcatgaaagtggaattcatcaggatgggatgcttaaatataaaggaacatacgaaattatatcgcctgatgatattggtctaacacgtgcaaatgaatttggtattgttcttgggaaactcagcggaaggcatgctgtgagatctaagctagtagagcttggatatgaaatcggtgacaaggaatttgaggacttctttaaacgctacaaagaggttgcagagaagaaaaagcgcgtaactgatgaagacttagaagcgttattgtcagatgagatattccagcctaaggttatttggtcccttgctgatgtacaggcaacatgtggtacacttgctttatctacggcaacagtgaaattggtagcaccagatggagaggagaaaatagcatgttcagtcggaacaggtccagtcgatgcagcttacaaggctgttgacaaaataatccagattccaacggttctccgagaatacagtatgacatcagtcacagaaggcattgacgcaatcgcgacaactcgggttgttgtcactggagatgtgagcaacaacgccaaacatgccctgactggccagtccttcaaccgctccttcagcgggagcggggcatccatggacattgtggtgtccagtgtcagagcttacctgagcgccctgaacaagatctgcagtttcgctggcgccgtgaaagccagcagcgatgtagctgagaccgcaagcgtcccgagcacagaatga

SEQ ID NO: 15 - RNA, 21 nt, Zea mays
ucauugagugcagcguugaug

SEQ ID NO: 16 - protein, 428 aa, Zea mays
MGNRIGGRRKSGVEERFTRPQGLYDHKDIDQKKLRKLILEAKLAPCYPGADDAAPGGGDLEECPICFLYYPSLNRSKCCSKGICTECFLQMKPTHTARPTQCPFCKTPNYAVEYRGVKTKEERSIEQFEEQKVIEAQLRMRQKELQDEEAKMRRKQGRCSSSRTVTPTTEVEYRDICSTSFSVPSYQCTEQGNECCSSEPSCSSQANRRPFHSRHNRDDNVDMNLENMMVMEAIWRSIQQEQGHLVNPVCGSYFPVIEPPSRERQAFLPAAPLEMPHPGGYSCVAALAEHQPPSMDFSYMAGSSTYPVFDMIRRPCNMSSGSLCSVENSSLDTWSGMAPNCSRGVVREEGECSTDHWSEGAEAGTSYAGSDIMVDAGAMQPLPFAENFTMAPSHFRPESIEEQMMFSMAVSLAEGHHGRTQAQGLAWL

SEQ ID NO: 17 - protein, 226 aa, Zea mays
MERVEDLGLSLSLSSSLASPRTHHVATMLLRAPEKRFLEMPLLLPAKRTTEVTGEDGLRGGSDEEDGGCGIDGSRKKLRLSKDQSAVLEDSFREHPTLNPRQKAALAQQLGLRPRQVEVWFQNRRARTKLKQTEVDCEYLKRCCETLTEENRRLQKEVQELRALKLVSPHLYMHMSPPTTLTMCPSCERVSSSNGNSAAATAAARARAGAGAGAIVCHPIDRATST

SEQ ID NO: 18 - protein, 227 aa, Oryza sativa
MGRGKIAIKRIDNTMNRQVTFSKRRGGLMKKARELAILCDADVGLIVFSCTGRLYDFSSSSMKSIIERYQEAGEEHCRLLNPMSEAKFWQREVTTLRQQVQNLHHNNRQLLGEEISNFTVRDLQLLQNQVEMSLHSIRNKKDQLLAEEILKLNEKGSLVQKENSELRKKFNIAHQRNIELHKKLNSGESTSSEQVTRSSKDPGESSTPRDSRVCIDLELSQKEVEDE

SEQ ID NO: 19 - protein, 399 aa, Zea mays
MMNLSAAANGRDEFPPYVVPSNAAAPPPSLLPTMEQQQESSIHREHHQLLGYNLEANSLALLPPSNAAAAHHHTTFAGGHSPHDILHFYTPPPSAASHYLAAAAGNPYSHLVSAPGTTFHQTSSSYYPPAAAAQAAPEYYFPTLVSSAEENMASFAATQLGLNLGYRTYFPPRGGYTYGHHPPRCQAEGCKADLSSAKRYHRRHKVCEHHSKAPVVVTAGGLHQRFCQQCSRFHLLDEFDDAKKSCRKRLADHNRRRRKSKPSDADAGDKKRAHANKAAAAKDKAESSSKNMDIGDGLGAQILGSALLSKEQDQTMDLGEVVKEAVDPKGKASMQQHYGFPFHSSSAGSCFPQTQAVSSDTTSNIGQVQEPSLGFHHQHHQHSNILQLGQAMFDLDFDH

SEQ ID NO: 20 - protein, 393 aa, Arabidopsis thaliana
MDCNMVSSSQWDWEHLIMSNPSRTEDDSKQLPTEWEIEKGEGIESIVPHFSGLERVSSGSATSFWHTAVSKSSQSTSINSSSPEAKRCKLASESSPGDSCSNIDFVQVKAPTALEVSVASAESDLCLKLGKRTYSEEYWGRNNNEISAVSMKLLTPSVVAGKSKLCGQSMPVPRCQIDGCELDLSSAKGYHRKHKVCEKHSKCPKVSVSGLERRFCQQCSRFHAVSEFDEKKRSCRKRLSHHNARRRKPQGVFSMNPERVYDRRQHTNMLWNGVSLNARSEEMYEWGNNTYDTKPRQTEKSFTLSFQRGNGSEDQLVASSSRMFSTSQTSGGFPAGKSKFQLHGEDVGEYSGVLHESQDIHRALSLLSTSSDPLAQPHVQPFSLLCSYDVVPK

SEQ ID NO: 21 - protein, 626 aa, Zea mays
MASSLLSSPAKPTITTTTKTTPAPRPARSAHVHVLSAARCLRLRLRASSQHPPPPPTPRSRRPDYVPNRIDDPNYVRIFDTTLRDGEQSPGATMTSAQKLVVARQLARLGVDIIEAGFPASSPDDLDAVRSIAIEVGNPAPGPAGEEDAVHVPVICGLSRCNRKDIDAAWEAVRHARRPRIHTFIATSDIHMQHKLRKTPDQVVAIAREMVAYARSLGCTDVEFSPEDAGRSNREFLYHILGEVIKAGATTLNIPDTVGYNLPYEFGKLIADIKANTPGIEKAIISTHCQNDLGLATANTLAGARAGARQLEVTINGIGERAGNASLEEVVMAIKCRRELLDGLYTGIDSRHITLTSKMVQEHSGLHVQPHKAIVGANAFAHESGIHQDGMLKYKGTYEIISPDDIGLTRANEFGIVLGKLSGRHAVRSKLVELGYEIGDKEFEDFFKRYKEVAEKKKRVTDEDLEALLSDEIFQPKVIWSLADVQATCGTLALSTATVKLVAPDGEEKIACSVGTGPVDAAYKAVDKIIQIPTVLREYSMTSVTEGIDAIATTRVVVTGDVSNNAKHALTGQSFNRSFSGSGASMDIVVSSVRAYLSALNKICSFAGAVKASSDVAETASVPSTE

SEQ ID NO: 22 - DNA, 11722 bp, Artificial sequence
  Synthetic Construct
cgcgcctgcctgcaggtactcgaggtcattcatatgcttgagaagagagtcgggatagtccaaaataaaacaaaggtaagattacctggtcaaaagtgaaaacatcagttaaaaggtggtataaagtaaaatatcggtaataaaaggtggcccaaagtgaaatttactcttttctactattataaaaattgaggatgtttttgtcggtactttgatacgtcatttttgtatgaattggtttttaagtttattcgcttttggaaatgcatatctgtatttgagtcgggttttaagttcgtttgcttttgtaaatacagagggatttgtataagaaatatctttagaaaaacccatatgctaatttgacataatttttgagaaaaatatatattcaggcgaattctcacaatgaacaataataagattaaaatagctttcccccgttgcagcgcatgggtattttttctagtaaaaataaaagataaacttagactcaaaacatttacaaaaacaacccctaaagttcctaaagcccaaagtgctatccacgatccatagcaagcccagcccaacccaacccaacccaacccaccccagtccagccaactggacaatagtctccacacccccccactatcaccgtgagttgtccgcacgcaccgcacgtctcgcagccaaaaaaaaaaagaaagaaaaaaaagaaaaagaaaaaacagcaggtgggtccgggtcgtgggggccggaaacgcgaggaggatcgcgagccagcgacgaggagcttaggcctcatcgttgaagatgcctctgccgacagtggtcccaaagatggacccccacccacgaggagcatcgtggaaaaagaagacgttccaaccacgtcttcaaagcaagtggattgatgtgatatctccactgacgtaagggatgacgcacaatcccactatccttcgaggcctcatcgttgaagatgcctctgccgacagtggtcccaaagatggacccccacccacgaggagcatcgtggaaaaagaagacgttccaaccacgtcttcaaagcaagtggattgatgtgatatctccactgacgtaagggatgacgcacaatcccactatccttcgaagctccctccctccgcttccaaagaaacgccccccatcgccactatatacatacccccccctctcctcccatccccccaacccttctagaaccatcttccacacactcaagccacactattggagaacacacagggacaacacaccataagatccaagggaggcctccgccgccgccggtaaccaccccgcccctctcctctttctttctccgtttttttttccgtctcggtctcgatctttggccttggtagtttgggtgggcgagaggcggcttcgtgcgcgcccagatcggtgcgcgggaggggcgggatctcgcggctggggctctcgccggcgtggatccggcccggatctcgcggggaatggggctctcggatgtagatctgcgatccgccgttgttgggggagatgatggggggtttaaaatttccgccgtgctaaacaagatcaggaagaggggaaaagggcactatggtttatatttttatatatttctgctgcttcgtcaggcttagatgtgctagatctttctttcttctttttgtgggtagaatttgaatccctcagcattgttcatcggtagtttttcttttcatgatttgtgacaaatgcagcctcgtgcggagcttttttgtaggtagaagcggaccggtcgcgcctcagcagtcgctgtcgttaacccagcggtactcgctgaggcgatcgcgggcccggtaccctgcaatgtgaccctagacttgtccatcttctggattggccaacttaattaatgtatgaaataaaaggatgcacacatagtgacatgctaatcactataatgtgggcatcaaagttgtgtgttatgtgtaattactaattatctgaataagagaaagagatcatccatatttcttatcctaaatgaatgtcacgtgtctttataattctttgatgaaccagatgcattttattaaccaattccatatacatataaatattaatcatatataattaatatcaattgggttagcaaaacaaatctagtctaggtgtgttttgctaattattgggggatagtgcaaaaagaaatctacgttctcaataattcagatagaaaacttaataaagtgagataatttacatagattgcttttatcctttgatatatgtgaaaccatgcatgatataaggaaaatagatagagaaataattttttacatcgttgaatatgtaaacaatttaattcaagaagctaggaatataaatattgaggagtttatgattattattattattttgatgttcaatgaagttttttttaatttcatatgaagtatacaaaaattcttcatagatttttgtttctatgccgtagttatctttaatatatttgtggttgaagaaatttattgctagaaacgaatggattgtcaatttttttttaaagcaaatatatatgaaattatactgtatattattttagtcatgattaaaatgtggccttaattgaatcatctttctcattcattttttcaaaagcatatcaggatgattgatatttatctattttaaaaattaatttaagggttcaaattaaatttaacttaaaagtgtcctaaccgtagttaaaggtttactttaaaaaaatactatgaaaaatctaatcttctatgaatcgacctgcaggatttaaatccatcgttctggggcctaacgggccaagcttactcgaggtcattcatatgcttgagaagagagtcgggatagtccaaaataaaacaaaggtaagattacctggtcaaaagtgaaaacatcagttaaaaggtggtataaagtaaaatatcggtaataaaaggtggcccaaagtgaaatttactcttttctactattataaaaattgaggatgtttttgtcggtactttgatacgtcatttttgtatgaattggtttttaagtttattcgcttttggaaatgcatatctgtatttgagtcgggttttaagttcgtttgcttttgtaaatacagagggatttgtataagaaatatctttagaaaaacccatatgctaatttgacataatttttgagaaaaatatatattcaggcgaattctcacaatgaacaataataagattaaaatagctttcccccgttgcagcgcatgggtattttttctagtaaaaataaaagataaacttagactcaaaacatttacaaaaacaacccctaaagttcctaaagcccaaagtgctatccacgatccatagcaagcccagcccaacccaacccaacccaacccaccccagtccagccaactggacaatagtctccacacccccccactatcaccgtgagttgtccgcacgcaccgcacgtctcgcagccaaaaaaaaaaagaaagaaaaaaaagaaaaagaaaaaacagcaggtgggtccgggtcgtgggggccggaaacgcgaggaggatcgcgagccagcgacgaggccggccctccctccgcttccaaagaaacgccccccatcgccactatatacatacccccccctctcctcccatccccccaaccctaccaccaccaccaccaccacctccacctcctcccccctcgctgccggacgacgagctcctcccccctccccctccgccgccgccgcgccggtaaccaccccgcccctctcctctttctttctccgtttttttttccgtctcggtctcgatctttggccttggtagtttgggtgggcgagaggcggcttcgtgcgcgcccagatcggtgcgcgggaggggcgggatctcgcggctggggctctcgccggcgtggatccggcccggatctcgcggggaatggggctctcggatgtagatctgcgatccgccgttgttgggggagatgatggggggtttaaaatttccgccgtgctaaacaagatcaggaagaggggaaaagggcactatggtttatatttttatatatttctgctgcttcgtcaggcttagatgtgctagatctttctttcttctttttgtgggtagaatttgaatccctcagcattgttcatcggtagtttttcttttcatgatttgtgacaaatgcagcctcgtgcggagcttttttgtaggtagaagtgatcaaccatggcgcaagttagcagaatctgcaatggtgtgcagaacccatctcttatctccaatctctcgaaatccagtcaacgcaaatctcccttatcggtttctctgaagacgcagcagcatccacgagcttatccgatttcgtcgtcgtggggattgaagaagagtgggatgacgttaattggctctgagcttcgtcctcttaaggtcatgtcttctgtttccacggcgtgcatgcttcacggtgcaagcagccggcccgcaaccgcccgcaaatcctctggcctttccggaaccgtccgcattcccggcgacaagtcgatctcccaccggtccttcatgttcggcggtctcgcgagcggtgaaacgcgcatcaccggccttctggaaggcgaggacgtcatcaatacgggcaaggccatgcaggcgatgggcgcccgcatccgtaaggaaggcgacacctggatcatcgatggcgtcggcaatggcggcctcctggcgcctgaggcgccgctcgatttcggcaatgccgccacgggctgccgcctgacgatgggcctcgtcggggtctacgatttcgacagcaccttcatcggcgacgcctcgctcacaaagcgcccgatgggccgcgtgttgaacccgctgcgcgaaatgggcgtgcaggtgaaatcggaagacggtgaccgtcttcccgttaccttgcgcgggccgaagacgccgacgccgatcacctaccgcgtgccgatggcctccgcacaggtgaagtccgccgtgctgctcgccggcctcaacacgcccggcatcacgacggtcatcgagccgatcatgacgcgcgatcatacggaaaagatgctgcagggctttggcgccaaccttaccgtcgagacggatgcggacggcgtgcgcaccatccgcctggaaggccgcggcaagctcaccggccaagtcatcgacgtgccgggcgacccgtcctcgacggccttcccgctggttgcggccctgcttgttccgggctccgacgtcaccatcctcaacgtgctgatgaaccccacccgcaccggcctcatcctgacgctgcaggaaatgggcgccgacatcgaagtcatcaacccgcgccttgccggcggcgaagacgtggcggacctgcgcgttcgctcctccacgctgaagggcgtcacggtgccggaagaccgcgcgccttcgatgatcgacgaatatccgattctcgctgtcgccgccgccttcgcggaaggggcgaccgtgatgaacggtctggaagaactccgcgtcaaggaaagcgaccgcctctcggccgtcgccaatggcctcaagctcaatggcgtggattgcgatgagggcgagacgtcgctcgtcgtgcgtggccgccctgacggcaaggggctcggcaacgcctcgggcgccgccgtcgccacccatctcgatcaccgcatcgccatgagcttcctcgtcatgggcctcgtgtcggaaaaccctgtcacggtggacgatgccacgatgatcgccacgagcttcccggagttcatggacctgatggccgggctgggcgcgaagatcgaactctccgatacgaaggctgcctgatgagctcgaattcccgatcgttcaaacatttggcaataaagtttcttaagattgaatcctgttgccggtcttgcgatgattatcatataatttctgttgaattacgttaagcatgtaataattaacatgtaatgcatgacgttatttatgagatgggtttttatgattagagtcccgcaattatacatttaatacgcgatagaaaacaaaatatagcgcgcaaactaggataaattatcgcgcgcggtgtcatctatgttactagatcggggatgggggatccactagtgatatccgtcgactggtacctacgcgtagctagcccgtgaagtttctcatctaagcccccatttggacgtgaatgtagacacgtcgaaataaagatttccgaattagaataatttgtttattgctttcgcctataaatacgacggatcgtaatttgtcgttttatcaaaatgtactttcattttataataacgctgcggacatctacatttttgaattgaaaaaaaattggtaattactctttctttttctccatattgaccatcatactcattgctgatccatgtagatttcccggacatgaagccatttacaattgaatatatcctgccgccgctgccgctttgcacccggtggagcttgcatgttggtttctacgcagaactgagccggttaggcagataatttccattgagaactgagccatgtgcaccttccccccaacacggtgagcgacggggcaacggagtgatccacatgggacttttcctagcttggctgccatttttggggtgaggccgttcgcggccgaggggcgcagcccctggggggatgggaggcccgcgttagcgggccgggagggttcgagaagggggggcaccccccttcggcgtgcgcggtcacgcgcacagggcgcagccctggttaaaaacaaggtttataaatattggtttaaaagcaggttaaaagacaggttagcggtggccgaaaaacgggcggaaacccttgcaaatgctggattttctgcctgtggacagcccctcaaatgtcaataggtgcgcccctcatctgtcagcactctgcccctcaagtgtcaaggatcgcgcccctcatctgtcagtagtcgcgcccctcaagtgtcaataccgcagggcacttatccccaggcttgtccacatcatctgtgggaaactcgcgtaaaatcaggcgttttcgccgatttgcgaggctggccagctccacgtcgccggccgaaatcgagcctgcccctcatctgtcaacgccgcgccgggtgagtcggcccctcaagtgtcaacgtccgcccctcatctgtcagtgagggccaagttttccgcgaggtatccacaacgccggcggccggccgcggtgtctcgcacacggcttcgacggcgtttctggcgcgtttgcagggccatagacggccgccagcccagcggcgagggcaaccagcccggtgagcgtcggaaagggtcgatcgaccgatgcccttgagagccttcaacccagtcagctccttccggtgggcgcggggcatgactatcgtcgccgcacttatgactgtcttctttatcatgcaactcgtaggacaggtgccggcagcgctctgggtcattttcggcgaggaccgctttcgctggagcgcgacgatgatcggcctgtcgcttgcggtattcggaatcttgcacgccctcgctcaagccttcgtcactggtcccgccaccaaacgtttcggcgagaagcaggccattatcgccggcatggcggccgacgcgctgggctacgtcttgctggcgttcgcgacgcgaggctggatggccttccccattatgattcttctcgcttccggcggcatcgggatgcccgcgttgcaggccatgctgtccaggcaggtagatgacgaccatcagggacagcttcaaggatcgctcgcggctcttaccagcctaacttcgatcattggaccgctgatcgtcacggcgatttatgccgcctcggcgagcacatggaacgggttggcatggattgtaggcgccgccctataccttgtctgcctccccgcgttgcgtcgcggtgcatggagccgggccacctcgacctgaatggaagccggcggcacctcgctaacggattcaccactccaagaattggagccaatcaattcttgcggagaactgtgaatgcgcaaaccaacccttggcagaacatatccatcgcgtccgccatctccagcagccgcacgcggcgcatctcgggcagcgttgggtcctggccacgggtgcgcatgatcgtgctcctgtcgttgaggacccggctaggctggcggggttgccttactggttagcagaatgaatcaccgatacgcgagcgaacgtgaagcgactgctgctgcaaaacgtctgcgacctgagcaacaacatgaatggtcttcggtttccgtgtttcgtaaagtctggaaacgcggaagtcagcgccctgcaccattatgttccggatctgcatcgcaggatgctgctggctaccctgtggaacacctacatctgtattaacgaagcgctggcattgaccctgagtgatttttctctggtcccgccgcatccataccgccagttgtttaccctcacaacgttccagtaaccgggcatgttcatcatcagtaacccgtatcgtgagcatcctctctcgtttcatcggtatcattacccccatgaacagaaatcccccttacacggaggcatcagtgaccaaacaggaaaaaaccgcccttaacatggcccgctttatcagaagccagacattaacgcttctggagaaactcaacgagctggacgcggatgaacaggcagacatctgtgaatcgcttcacgaccacgctgatgagctttaccgcagctgcctcgcgcgtttcggtgatgacggtgaaaacctctgacacatgcagctcccggagacggtcacagcttgtctgtaagcggatgccgggagcagacaagcccgtcagggcgcgtcagcgggtgttggcgggtgtcggggcgcagccatgacccagtcacgtagcgatagcggagtgtatactggcttaactatgcggcatcagagcagattgtactgagagtgcaccatatgcggtgtgaaataccgcacagatgcgtaaggagaaaataccgcatcaggcgctcttccgcttcctcgctcactgactcgctgcgctcggtcgttcggctgcggcgagcggtatcagctcactcaaaggcggtaatacggttatccacagaatcaggggataacgcaggaaagaacatgtgagcaaaaggccagcaaaaggccaggaaccgtaaaaaggccgcgttgctggcgtttttccataggctccgcccccctgacgagcatcacaaaaatcgacgctcaagtcagaggtggcgaaacccgacaggactataaagataccaggcgtttccccctggaagctccctcgtgcgctctcctgttccgaccctgccgcttaccggatacctgtccgcctttctcccttcgggaagcgtggcgctttctcatagctcacgctgtaggtatctcagttcggtgtaggtcgttcgctccaagctgggctgtgtgcacgaaccccccgttcagcccgaccgctgcgccttatccggtaactatcgtcttgagtccaacccggtaagacacgacttatcgccactggcagcagccactggtaacaggattagcagagcgaggtatgtaggcggtgctacagagttcttgaagtggtggcctaactacggctacactagaaggacagtatttggtatctgcgctctgctgaagccagttaccttcggaaaaagagttggtagctcttgatccggcaaacaaaccaccgctggtagcggtggtttttttgtttgcaagcagcagattacgcgcagaaaaaaaggatctcaagaagatcctttgatcttttctacggggtctgacgctcagtggaacgaaaactcacgttaagggattttggtcatgagattatcaaaaaggatcttcacctagatccttttaaattaaaaatgaagttttaaatcaatctaaagtatatatgagtaaacttggtctgacagttaccaatgcttaatcagtgaggcacctatctcagcgatctgtctatttcgttcatccatagttgcctgactccccgtcgtgtagataactacgatacgggagggcttaccatctggccccagtgctgcaatgataccgcgagacccacgctcaccggctccagatttatcagcaataaaccagccagccggaagggccgagcgcagaagtggtcctgcaactttatccgcctccatccagtctattaattgttgccgggaagctagagtaagtagttcgccagttaatagtttgcgcaacgttgttgccattgctgcaggtcgggagcacaggatgacgcctaacaattcattcaagccgacaccgcttcgcggcgcggcttaattcaggagttaaacatcatgagggaagcggtgatcgccgaagtatcgactcaactatcagaggtagttggcgtcatcgagcgccatctcgaaccgacgttgctggccgtacatttgtacggctccgcagtggatggcggcctgaagccacacagtgatattgatttgctggttacggtgaccgtaaggcttgatgaaacaacgcggcgagctttgatcaacgaccttttggaaacttcggcttcccctggagagagcgagattctccgcgctgtagaagtcaccattgttgtgcacgacgacatcattccgtggcgttatccagctaagcgcgaactgcaatttggagaatggcagcgcaatgacattcttgcaggtatcttcgagccagccacgatcgacattgatctggctatcttgctgacaaaagcaagagaacatagcgttgccttggtaggtccagcggcggaggaactctttgatccggttcctgaacaggatctatttgaggcgctaaatgaaaccttaacgctatggaactcgccgcccgactgggctggcgatgagcgaaatgtagtgcttacgttgtcccgcatttggtacagcgcagtaaccggcaaaatcgcgccgaaggatgtcgctgccgactgggcaatggagcgcctgccggcccagtatcagcccgtcatacttgaagctaggcaggcttatcttggacaagaagatcgcttggcctcgcgcgcagatcagttggaagaatttgttcactacgtgaaaggcgagatcaccaaggtagtcggcaaataatgtctaacaattcgttcaagccgacgccgcttcgcggcgcggcttaactcaagcgttagatgctgcaggcatcgtggtgtcacgctcgtcgtttggtatggcttcattcagctccggttcccaacgatcaaggcgagttacatgatcccccatgttgtgcaaaaaagcggttagctccttcggtcctccgatcgaggatttttcggcgctgcgctacgtccgcgaccgcgttgagggatcaagccacagcagcccactcgaccttctagccgacccagacgagccaagggatctttttggaatgctgctccgtcgtcaggctttccgacgtttgggtggttgaacagaagtcattatcgcacggaatgccaagcactcccgaggggaaccctgtggttggcatgcacatacaaatggacgaacggataaaccttttcacgcccttttaaatatccgattattctaataaacgctcttttctcttaggtttacccgccaatatatcctgtcaaacactgatagtttaaactgaaggcgggaaacgacaatctgg

SEQ ID NO: 23 - DNA, 9769 bp, Artificial sequence
  Synthetic Construct
ggtccgatgtgagacttttcaacaaagggtaatatccggaaacctcctcggattccattgcccagctatctgtcactttattgtgaagatagtggaaaaggaaggtggctcctacaaatgccatcattgcgataaaggaaaggccatcgttgaagatgcctctgccgacagtggtcccaaagatggacccccacccacgaggagcatcgtggaaaaagaagacgttccaaccacgtcttcaaagcaagtggattgatgtgatggtccgattgagacttttcaacaaagggtaatatccggaaacctcctcggattccattgcccagctatctgtcactttattgtgaagatagtggaaaaggaaggtggctcctacaaatgccatcattgcgataaaggaaaggccatcgttgaagatgcctctgccgacagtggtcccaaagatggacccccacccacgaggagcatcgtggaaaaagaagacgttccaaccacgtcttcaaagcaagtggattgatgtgatatctccactgacgtaagggatgacgcacaatcccactatccttcgcaagacccttcctctatataaggaagttcatttcatttggagaggaccaggtggtaccggcgcgcctcagcagtcgctgtcgttaacccagcggtactcgctgaggcgatcgcgggccctgatcacctgtcgtacagtatttctacatttgatgtgtgatttgtgaagaacatcaaacaaaacaagcactggctttaatatgatgataagtattatggtaattaattaattggcaaaaacaacaatgaagctaaaattttatttattgagccttgcggttaatttcttgtgatgatctttttttttattttctaattatatatagtttcctttgctttgaaatgctaaaggtttgagagagttatgctctttttttcttcctctttcttttttaactttatcatacaaattttgaataaaaatgtgagtacattgagctcatttaaataagcttgatggggatcagattgtcgtttcccgccttcagtttaaactatcagtgtttgacaggatatattggcgggtaaacctaagagaaaagagcgtttattagaataatcggatatttaaaagggcgtgaaaaggtttatccgttcgtccatttgtatgtgcatgccaaccacagggttcccctcgggagtgcttggcattccgtgcgataatgacttctgttcaaccacccaaacgtcggaaagcctgacgacggagcagcattccaaaaagatcccttggctcgtctgggtcggctagaaggtcgagtgggctgctgtggcttgatccctcaacgcggtcgcggacgtagcgcagcgccgaaaaatcctcgatcggaggaccgaaggagctaaccgcttttttgcacaacatgggggatcatgtaactcgccttgatcgttgggaaccggagctgaatgaagccataccaaacgacgagcgtgacaccacgatgcctgcagcatctaacgcttgagttaagccgcgccgcgaagcggcgtcggcttgaacgaattgttagacattatttgccgactaccttggtgatctcgcctttcacgtagtgaacaaattcttccaactgatctgcgcgcgaggccaagcgatcttcttgtccaagataagcctgcctagcttcaagtatgacgggctgatactgggccggcaggcgctccattgcccagtcggcagcgacatccttcggcgcgattttgccggttactgcgctgtaccaaatgcgggacaacgtaagcactacatttcgctcatcgccagcccagtcgggcggcgagttccatagcgttaaggtttcatttagcgcctcaaatagatcctgttcaggaaccggatcaaagagttcctccgccgctggacctaccaaggcaacgctatgttctcttgcttttgtcagcaagatagccagatcaatgtcgatcgtggctggctcgaagatacctgcaagaatgtcattgcgctgccattctccaaattgcagttcgcgcttagctggataacgccacggaatgatgtcgtcgtgcacaacaatggtgacttctacagcgcggagaatctcgctctctccaggggaagccgaagtttccaaaaggtcgttgatcaaagctcgccgcgttgtttcatcaagccttacggtcaccgtaaccagcaaatcaatatcactgtgtggcttcaggccgccatccactgcggagccgtacaaatgtacggccagcaacgtcggttcgagatggcgctcgatgacgccaactacctctgatagttgagtcgatacttcggcgatcaccgcttccctcatgatgtttaactcctgaattaagccgcgccgcgaagcggtgtcggcttgaatgaattgttaggcgtcatcctgtgctcccgacctgcagcaatggcaacaacgttgcgcaaactattaactggcgaactacttactctagcttcccggcaacaattaatagactggatggaggcggataaagttgcaggaccacttctgcgctcggcccttccggctggctggtttattgctgataaatctggagccggtgagcgtgggtctcgcggtatcattgcagcactggggccagatggtaagccctcccgtatcgtagttatctacacgacggggagtcaggcaactatggatgaacgaaatagacagatcgctgagataggtgcctcactgattaagcattggtaactgtcagaccaagtttactcatatatactttagattgatttaaaacttcatttttaatttaaaaggatctaggtgaagatcctttttgataatctcatgaccaaaatcccttaacgtgagttttcgttccactgagcgtcagaccccgtagaaaagatcaaaggatcttcttgagatcctttttttctgcgcgtaatctgctgcttgcaaacaaaaaaaccaccgctaccagcggtggtttgtttgccggatcaagagctaccaactctttttccgaaggtaactggcttcagcagagcgcagataccaaatactgtccttctagtgtagccgtagttaggccaccacttcaagaactctgtagcaccgcctacatacctcgctctgctaatcctgttaccagtggctgctgccagtggcgataagtcgtgtcttaccgggttggactcaagacgatagttaccggataaggcgcagcggtcgggctgaacggggggttcgtgcacacagcccagcttggagcgaacgacctacaccgaactgagatacctacagcgtgagctatgagaaagcgccacgcttcccgaagggagaaaggcggacaggtatccggtaagcggcagggtcggaacaggagagcgcacgagggagcttccagggggaaacgcctggtatctttatagtcctgtcgggtttcgccacctctgacttgagcgtcgatttttgtgatgctcgtcaggggggcggagcctatggaaaaacgccagcaacgcggcctttttacggttcctggccttttgctggccttttgctcacatgttctttcctgcgttatcccctgattctgtggataaccgtattaccgcctttgagtgagctgataccgctcgccgcagccgaacgaccgagcgcagcgagtcagtgagcgaggaagcggaagagcgcctgatgcggtattttctccttacgcatctgtgcggtatttcacaccgcatatggtgcactctcagtacaatctgctctgatgccgcatagttaagccagtatacactccgctatcgctacgtgactgggtcatggctgcgccccgacacccgccaacacccgctgacgcgccctgacgggcttgtctgctcccggcatccgcttacagacaagctgtgaccgtctccgggagctgcatgtgtcagaggttttcaccgtcatcaccgaaacgcgcgaggcagctgcggtaaagctcatcagcgtggtcgtgaagcgattcacagatgtctgcctgttcatccgcgtccagctcgttgagtttctccagaagcgttaatgtctggcttctgataaagcgggccatgttaagggcggttttttcctgtttggtcactgatgcctccgtgtaagggggatttctgttcatgggggtaatgataccgatgaaacgagagaggatgctcacgatacgggttactgatgatgaacatgcccggttactggaacgttgtgagggtaaacaactggcggtatggatgcggcgggaccagagaaaaatcactcagggtcaatgccagcgcttcgttaatacagatgtaggtgttccacagggtagccagcagcatcctgcgatgcagatccggaacataatggtgcagggcgctgacttccgcgtttccagactttacgaaacacggaaaccgaagaccattcatgttgttgctcaggtcgcagacgttttgcagcagcagtcgcttcacgttcgctcgcgtatcggtgattcattctgctaaccagtaaggcaaccccgccagcctagccgggtcctcaacgacaggagcacgatcatgcgcacccgtggccaggacccaacgctgcccgagatgcgccgcgtgcggctgctggagatggcggacgcgatggatatgttctgccaagggttggtttgcgcattcacagttctccgcaagaattgattggctccaattcttggagtggtgaatccgttagcgaggtgccgccggcttccattcaggtcgaggtggcccggctccatgcaccgcgacgcaacgcggggaggcagacaaggtatagggcggcgcctacaatccatgccaacccgttccatgtgctcgccgaggcggcataaatcgccgtgacgatcagcggtccaatgatcgaagttaggctggtaagagccgcgagcgatccttgaagctgtccctgatggtcgtcatctacctgcctggacagcatggcctgcaacgcgggcatcccgatgccgccggaagcgagaagaatcataatggggaaggccatccagcctcgcgtcgcgaacgccagcaagacgtagcccagcgcgtcggccgccatgccggcgataatggcctgcttctcgccgaaacgtttggtggcgggaccagtgacgaaggcttgagcgagggcgtgcaagattccgaataccgcaagcgacaggccgatcatcgtcgcgctccagcgaaagcggtcctcgccgaaaatgacccagagcgctgccggcacctgtcctacgagttgcatgataaagaagacagtcataagtgcggcgacgatagtcatgccccgcgcccaccggaaggagctgactgggttgaaggctctcaagggcatcggtcgatcgaccctttccgacgctcaccgggctggttgccctcgccgctgggctggcggccgtctatggccctgcaaacgcgccagaaacgccgtcgaagccgtgtgcgagacaccgcggccggccgccggcgttgtggatacctcgcggaaaacttggccctcactgacagatgaggggcggacgttgacacttgaggggccgactcacccggcgcggcgttgacagatgaggggcaggctcgatttcggccggcgacgtggagctggccagcctcgcaaatcggcgaaaacgcctgattttacgcgagtttcccacagatgatgtggacaagcctggggataagtgccctgcggtattgacacttgaggggcgcgactactgacagatgaggggcgcgatccttgacacttgaggggcagagtgctgacagatgaggggcgcacctattgacatttgaggggctgtccacaggcagaaaatccagcatttgcaagggtttccgcccgtttttcggccaccgctaacctgtcttttaacctgcttttaaaccaatatttataaaccttgtttttaaccagggctgcgccctgtgcgcgtgaccgcgcacgccgaaggggggtgcccccccttctcgaaccctcccggcccgctaacgcgggcctcccatccccccaggggctgcgcccctcggccgcgaacggcctcaccccaaaaatggcagccaagctaggaaaagtcccatgtggatcactccgttgccccgtcgctcaccgtgttggggggaaggtgcacatggctcagttctcaatggaaattatctgcctaaccggctcagttctgcgtagaaaccaacatgcaagctccaccgggtgcaaagcggcagcggcggcaggatatattcaattgtaaatggcttcatgtccgggaaatctacatggatcagcaatgagtatgatggtcaatatggagaaaaagaaagagtaattaccaattttttttcaattcaaaaatgtagatgtccgcagcgttattataaaatgaaagtacattttgataaaacgacaaattacgatccgtcgtatttataggcgaaagcaataaacaaattattctaattcggaaatctttatttcgacgtgtctacattcacgtccaaatgggggcttagatgagaaacttcacgatcgatgcggccaccactcgagaagcttactagtcaacaattggccaatctttgttctaaattgctaataaacgaccatttccgtcaattctccttggttgcaacagtctacccgtcaaatgtttactaatttataagtgtgaagtttgaattatgaaagacgaaatcgtattaaaaattcacaagaataaacaactccatagattttcaaaaaaacagtcacgagaaaaaaaccacagtccgtttgtctgctcttctagtttttattatttttctattaatagttttttgttatttcgagaataaaatttgaacgatgtccgaaccacaaaagccgagccgataaatcctaagccgagcctaactttagccgtaaccatcagtcacggctcccgggctaattcatttgaaccgaatcataatcaacggtttagatcaaactcaaaacaatctaacggcaacatagacgcgtcggtgagctaaaaagagtgtgaaagccaggtcaccatagcattgtctctcccagattttttatttgggaaataatagaagaaatagaaaaaaataaaagagtgagaaaaatcgtagagctatatattcgcacatgtactcgtttcgctttccttagtgttagctgctgccgctgttgtttctcctccatttctctatctttctctctcgctgcttctcgaatcttctgtatcatcttcttcttcttcaaggtgagtctctagatccgttcgcttgattttgctgctcgttagtcgttattgttgattctctatgccgatttcgctagatctgtttagcatgcgttgtggttttatgagaaaatctttgttttgggggttgcttgttatgtgattcgatccgtgcttgttggatcgatctgagttaattcttaaggtttatgtgttagatctatggagtttgaggattcttctcgcttctgtcgatctctcgctgttatttttgtttttttcagtgaagtgaagttgtttagttcgaaatgacttcgtgtatgctcgattgatctggttttaatcttcgatctgttaggtgttgatgtttacaagtgaattctagtgttttctcgttgagatctgtgaagtttgaacctagttttctcaataatcaacatatgaagcgatgtttgagtttcaataaacgctgctaatcttcgaaactaagttgtgatctgattcgtgtttacttcatgagcttatccaattcatttcggtttcattttactttttttttagtgaaccatggcgcaagttagcagaatctgcaatggtgtgcagaacccatctcttatctccaatctctcgaaatccagtcaacgcaaatctcccttatcggtttctctgaagacgcagcagcatccacgagcttatccgatttcgtcgtcgtggggattgaagaagagtgggatgacgttaattggctctgagcttcgtcctcttaaggtcatgtcttctgtttccacggcgtgcatgcttcatggagcttcatctaggccagctactgccaggaagtctagcgggctcagtggcaccgtgcgcatccctggcgataaaagtatttcacacaggagcttcatgttcggaggacttgctagtggagagacgagaatcactggtttgcttgagggcgaagatgttatcaacaccggtaaggcgatgcaagcaatgggtgccagaatccgaaaagagggcgatacgtggatcatcgacggtgttggtaacggaggattgctcgctcccgaagcgccacttgactttgggaacgcagctacggggtgccgtcttactatgggactggtaggcgtgtatgactttgactctaccttcatcggtgacgcgagcctcactaagagaccaatgggacgagtgctgaatcccctgagggagatgggtgtccaggtgaaatctgaggatggtgatcgtcttccggttactctgcgaggccccaagacccccacgccaatcacgtacagggttccgatggcgtcagcacaggtcaagtcagcggtactcctggcgggcctcaacacacctggaatcacaaccgtgattgaacccatcatgactagagaccacacggagaagatgttgcagggtttcggcgctaatctaacggtcgaaaccgacgccgacggcgtgaggacaatccgcttggagggcagaggtaaactgactggccaagtcatcgatgtgcctggagatccctcgtccacagcgtttcccctcgtagctgcgttgctcgtccctggatctgatgtgacgatcctgaatgtcctcatgaatccaactagaaccggcctcatcctcacattgcaggagatgggtgctgacatcgaggttatcaatcctaggttggcaggtggagaggatgtggccgatctgcgcgtgcgttctagtacactcaaaggcgtgaccgtccctgaggatcgcgctccatccatgatcgacgagtaccccattctcgccgttgctgctgcgtttgccgagggcgcaactgtaatgaacggccttgaggagttgagggttaaggagagtgacaggctgtccgcggtggcgaatggcctgaagctaaacggcgtggactgcgacgaaggtgaaacgtcccttgtagtccgtggtcgcccagacgggaaggggttggggaatgcttcgggagctgctgtggcgacgcaccttgatcatagaatcgccatgtcatttctggtgatgggacttgtctccgagaatccggtgaccgttgacgatgctaccatgatcgccacctcctttcctgagttcatggacctcatggcaggcttgggggccaagatcgagctgtctgatactaaggccgcttgaattcccgatcgttcaaacatttggcaataaagtttcttaagattgaatcctgttgccggtcttgcgatgattatcatataatttctgttgaattacgttaagcatgtaataattaacatgtaatgcatgacgttatttatgagatgggtttttatgattagagtcccgcaattatacatttaatacgcgatagaaaacaaaatatagcgcgcaaactaggataaattatcgcgcgcggtgtcatctatgttactagatcggggatcccacgtgcggaccgcctgcaggccgcgttatcaagctaactgca

SEQ ID NO: 24 - DNA, 8504 bp, Artificial sequence
  Synthetic Construct
aggatttttcggcgctgcgctacgtccgcgaccgcgttgagggatcaagccacagcagcccactcgaccttctagccgacccagacgagccaagggatctttttggaatgctgctccgtcgtcaggctttccgacgtttgggtggttgaacagaagtcattatcgcacggaatgccaagcactcccgaggggaaccctgtggttggcatgcacatacaaatggacgaacggataaaccttttcacgcccttttaaatatccgattattctaataaacgctcttttctcttaggtttacccgccaatatatcctgtcaaacactgatagtttaaactgaaggcgggaaacgacaatctgatccccatcaagcttggccagcttctgcaggtccgattgagacttttcaacaaagggtaatatccggaaacctcctcggattccattgcccagctatctgtcactttattgtgaagatagtggaaaaggaaggtggctcctacaaatgccatcattgcgataaaggaaaggccatcgttgaagatgcctctgccgacagtggtcccaaagatggacccccacccacgaggagcatcgtggaaaaagaagacgttccaaccacgtcttcaaagcaagtggattgatgtgatggtccgattgagacttttcaacaaagggtaatatccggaaacctcctcggattccattgcccagctatctgtcactttattgtgaagatagtggaaaaggaaggtggctcctacaaatgccatcattgcgataaaggaaaggccatcgttgaagatgcctctgccgacagtggtcccaaagatggacccccacccacgaggagcatcgtggaaaaagaagacgttccaaccacgtcttcaaagcaagtggattgatgtgatatctccactgacgtaagggatgacgcacaatcccactatccttcgcaagacccttcctctatataaggaagttcatttcatttggagaggacacagaaaaatttgctacattgtttcacaaacttcaaatattattcatttatttgtcagctttcaaactctttgtttcttgtttgttgattagatctggtaccctcagcagtcgctgtgcgatcgccagcggtactcgctgaggtcgacgtagttagttaattcagctttcgttcgtatcatcggtttcgacaacgttcgtcaagttcaatgcatcagtttcattgcgcacacaccagaatcctactgagtttgagtattatggcattgggaaaactgtttttcttgtaccatttgttgtgcttgtaatttactgtgttttttattcggttttcgctatcgaactgtgaaatggaaatggatggagaagagttaatgaatgatatggtccttttgttcattctcaaattaatattatttgttttttctcttatttgttgtgtgttgaatttgaaattataagagatatgcaaacattttgttttgagtaaaaatgtgtcaaatcgtggcctctaatgaccgaagttaatatgaggagtaaaacacttgtagttgtaccattatgcttattcactaggcaacaaatatattttcagacctagaaaagctgcaaatgttactgaatacaagtatgtcctcttgtgttttagacatttatgaactttcctttatgtaattttccagaatccttgtcagattctaatcattgctttataattatagttatactcatggatttgtagttgagtatgaaaatattttttaatgcattttatgacttgccaattgattgacaacgcggccgccactcgagtggaagctagctttccgatcctacctgtcacttcatcaaaaggacagtagaaaaggaaggtggcacctacaaatgccatcattgcgataaaggaaaggctatcattcaagatgcctctgccgacagtggtcccaaagatggacccccacccacgaggagcatcgtggaaaaagaagacgttccaaccacgtcttcaaagcaagtggattgatgtgatacttccactgacgtaagggatgacgcacaatcccactatccttcgcaagacccttcctctatataaggaagttcatttcatttggagaggacacgctgaaatcaccagtctctctctacaagatcggggatctctagctagacgatcgtttcgcatgattgaacaagatggattgcacgcaggttctccggccgcttgggtggagaggctattcggctatgactgggcacaacagacaatcggctgctctgatgccgccgtgttccggctgtcagcgcaggggcgcccggttctttttgtcaagaccgacctgtccggtgccctgaatgaactgcaggacgaggcagcgcggctatcgtggctggccacgacgggcgttccttgcgcagctgtgctcgacgttgtcactgaagcgggaagggactggctgctattgggcgaagtgccggggcaggatctcctgtcatctcaccttgctcctgccgagaaagtatccatcatggctgatgcaatgcggcggctgcatacgcttgatccggctacctgcccattcgaccaccaagcgaaacatcgcatcgagcgagcacgtactcggatggaagccggtcttgtcgatcaggatgatctggacgaagagcatcaggggctcgcgccagccgaactgttcgccaggctcaaggcgcgcatgcccgacggcgaggatctcgtcgtgacccatggcgatgcctgcttgccgaatatcatggtggaaaatggccgcttttctggattcatcgactgtggccggctgggtgtggcggaccgctatcaggacatagcgttggctacccgtgatattgctgaagagcttggcggcgaatgggctgaccgcttcctcgtgctttacggtatcgccgctcccgattcgcagcgcatcgccttctatcgccttcttgacgagttcttctgagcgggactctggggttcgatccccaattcccgatcgttcaaacatttggcaataaagtttcttaagattgaatcctgttgccggtcttgcgatgattatcatataatttctgttgaattacgttaagcatgtaataattaacatgtaatgcatgacgttatttatgagatgggtttttatgattagagtcccgcaattatacatttaatacgcgatagaaaacaaaatatagcgcgcaaactaggataaattatcgcgcgcggtgtcatctatgttactagatcggggatcgggccactcgagtggtggccgcatcgatcgtgaagtttctcatctaagcccccatttggacgtgaatgtagacacgtcgaaataaagatttccgaattagaataatttgtttattgctttcgcctataaatacgacggatcgtaatttgtcgttttatcaaaatgtactttcattttataataacgctgcggacatctacatttttgaattgaaaaaaaattggtaattactctttctttttctccatattgaccatcatactcattgctgatccatgtagatttcccggacatgaagccatttacaattgaatatatcctgccgccgctgccgctttgcacccggtggagcttgcatgttggtttctacgcagaactgagccggttaggcagataatttccattgagaactgagccatgtgcaccttccccccaacacggtgagcgacggggcaacggagtgatccacatgggacttttcctagcttggctgccatttttggggtgaggccgttcgcggccgaggggcgcagcccctggggggatgggaggcccgcgttagcgggccgggagggttcgagaagggggggcaccccccttcggcgtgcgcggtcacgcgcacagggcgcagccctggttaaaaacaaggtttataaatattggtttaaaagcaggttaaaagacaggttagcggtggccgaaaaacgggcggaaacccttgcaaatgctggattttctgcctgtggacagcccctcaaatgtcaataggtgcgcccctcatctgtcagcactctgcccctcaagtgtcaaggatcgcgcccctcatctgtcagtagtcgcgcccctcaagtgtcaataccgcagggcacttatccccaggcttgtccacatcatctgtgggaaactcgcgtaaaatcaggcgttttcgccgatttgcgaggctggccagctccacgtcgccggccgaaatcgagcctgcccctcatctgtcaacgccgcgccgggtgagtcggcccctcaagtgtcaacgtccgcccctcatctgtcagtgagggccaagttttccgcgaggtatccacaacgccggcggccggccgcggtgtctcgcacacggcttcgacggcgtttctggcgcgtttgcagggccatagacggccgccagcccagcggcgagggcaaccagcccggtgagcgtcggaaagggtcgatcgaccgatgcccttgagagccttcaacccagtcagctccttccggtgggcgcggggcatgactatcgtcgccgcacttatgactgtcttctttatcatgcaactcgtaggacaggtgccggcagcgctctgggtcattttcggcgaggaccgctttcgctggagcgcgacgatgatcggcctgtcgcttgcggtattcggaatcttgcacgccctcgctcaagccttcgtcactggtcccgccaccaaacgtttcggcgagaagcaggccattatcgccggcatggcggccgacgcgctgggctacgtcttgctggcgttcgcgacgcgaggctggatggccttccccattatgattcttctcgcttccggcggcatcgggatgcccgcgttgcaggccatgctgtccaggcaggtagatgacgaccatcagggacagcttcaaggatcgctcgcggctcttaccagcctaacttcgatcattggaccgctgatcgtcacggcgatttatgccgcctcggcgagcacatggaacgggttggcatggattgtaggcgccgccctataccttgtctgcctccccgcgttgcgtcgcggtgcatggagccgggccacctcgacctgaatggaagccggcggcacctcgctaacggattcaccactccaagaattggagccaatcaattcttgcggagaactgtgaatgcgcaaaccaacccttggcagaacatatccatcgcgtccgccatctccagcagccgcacgcggcgcatctcgggcagcgttgggtcctggccacgggtgcgcatgatcgtgctcctgtcgttgaggacccggctaggctggcggggttgccttactggttagcagaatgaatcaccgatacgcgagcgaacgtgaagcgactgctgctgcaaaacgtctgcgacctgagcaacaacatgaatggtcttcggtttccgtgtttcgtaaagtctggaaacgcggaagtcagcgccctgcaccattatgttccggatctgcatcgcaggatgctgctggctaccctgtggaacacctacatctgtattaacgaagcgctggcattgaccctgagtgatttttctctggtcccgccgcatccataccgccagttgtttaccctcacaacgttccagtaaccgggcatgttcatcatcagtaacccgtatcgtgagcatcctctctcgtttcatcggtatcattacccccatgaacagaaatcccccttacacggaggcatcagtgaccaaacaggaaaaaaccgcccttaacatggcccgctttatcagaagccagacattaacgcttctggagaaactcaacgagctggacgcggatgaacaggcagacatctgtgaatcgcttcacgaccacgctgatgagctttaccgcagctgcctcgcgcgtttcggtgatgacggtgaaaacctctgacacatgcagctcccggagacggtcacagcttgtctgtaagcggatgccgggagcagacaagcccgtcagggcgcgtcagcgggtgttggcgggtgtcggggcgcagccatgacccagtcacgtagcgatagcggagtgtatactggcttaactatgcggcatcagagcagattgtactgagagtgcaccatatgcggtgtgaaataccgcacagatgcgtaaggagaaaataccgcatcaggcgctcttccgcttcctcgctcactgactcgctgcgctcggtcgttcggctgcggcgagcggtatcagctcactcaaaggcggtaatacggttatccacagaatcaggggataacgcaggaaagaacatgtgagcaaaaggccagcaaaaggccaggaaccgtaaaaaggccgcgttgctggcgtttttccataggctccgcccccctgacgagcatcacaaaaatcgacgctcaagtcagaggtggcgaaacccgacaggactataaagataccaggcgtttccccctggaagctccctcgtgcgctctcctgttccgaccctgccgcttaccggatacctgtccgcctttctcccttcgggaagcgtggcgctttctcatagctcacgctgtaggtatctcagttcggtgtaggtcgttcgctccaagctgggctgtgtgcacgaaccccccgttcagcccgaccgctgcgccttatccggtaactatcgtcttgagtccaacccggtaagacacgacttatcgccactggcagcagccactggtaacaggattagcagagcgaggtatgtaggcggtgctacagagttcttgaagtggtggcctaactacggctacactagaaggacagtatttggtatctgcgctctgctgaagccagttaccttcggaaaaagagttggtagctcttgatccggcaaacaaaccaccgctggtagcggtggtttttttgtttgcaagcagcagattacgcgcagaaaaaaaggatctcaagaagatcctttgatcttttctacggggtctgacgctcagtggaacgaaaactcacgttaagggattttggtcatgagattatcaaaaaggatcttcacctagatccttttaaattaaaaatgaagttttaaatcaatctaaagtatatatgagtaaacttggtctgacagttaccaatgcttaatcagtgaggcacctatctcagcgatctgtctatttcgttcatccatagttgcctgactccccgtcgtgtagataactacgatacgggagggcttaccatctggccccagtgctgcaatgataccgcgagacccacgctcaccggctccagatttatcagcaataaaccagccagccggaagggccgagcgcagaagtggtcctgcaactttatccgcctccatccagtctattaattgttgccgggaagctagagtaagtagttcgccagttaatagtttgcgcaacgttgttgccattgctgcaggtcgggagcacaggatgacgcctaacaattcattcaagccgacaccgcttcgcggcgcggcttaattcaggagttaaacatcatgagggaagcggtgatcgccgaagtatcgactcaactatcagaggtagttggcgtcatcgagcgccatctcgaaccgacgttgctggccgtacatttgtacggctccgcagtggatggcggcctgaagccacacagtgatattgatttgctggttacggtgaccgtaaggcttgatgaaacaacgcggcgagctttgatcaacgaccttttggaaacttcggcttcccctggagagagcgagattctccgcgctgtagaagtcaccattgttgtgcacgacgacatcattccgtggcgttatccagctaagcgcgaactgcaatttggagaatggcagcgcaatgacattcttgcaggtatcttcgagccagccacgatcgacattgatctggctatcttgctgacaaaagcaagagaacatagcgttgccttggtaggtccagcggcggaggaactctttgatccggttcctgaacaggatctatttgaggcgctaaatgaaaccttaacgctatggaactcgccgcccgactgggctggcgatgagcgaaatgtagtgcttacgttgtcccgcatttggtacagcgcagtaaccggcaaaatcgcgccgaaggatgtcgctgccgactgggcaatggagcgcctgccggcccagtatcagcccgtcatacttgaagctaggcaggcttatcttggacaagaagatcgcttggcctcgcgcgcagatcagttggaagaatttgttcactacgtgaaaggcgagatcaccaaggtagtcggcaaataatgtctaacaattcgttcaagccgacgccgcttcgcggcgcggcttaactcaagcgttagatgctgcaggcatcgtggtgtcacgctcgtcgtttggtatggcttcattcagctccggttcccaacgatcaaggcgagttacatgatcccccatgttgtgcaaaaaagcggttagctccttcggtcctccgatcg

SEQ ID NO: 25 - protein, 424 aa, Hordeum vulgare subsp. vulgare
MGNRIGGRRKAGVEERYTRPQGLYEHRDIDQKKLRKLILETKLAPCYPGADDAAGADLEECPICFLYYPSLNRSKCCSKGICTECFLQMKPTHTARPTQCPFCKTPNYAVEYRGVKTKEERSIEQFEEQKVIEAQMRMRQQALQDEEDKMRRKQSRCSSSRTIAPTTEVEYRDICSTSYSAPPYRCTEQETECCSSEPSCSAQANMRSFHSRHTRDGNIDMNIEDMMVMEAIWRSIQEQGSIGNPACGSFMPFEQPTRERQAFVAASPLEIPHPGGFSCAVAAMTEHQPSSMDFSYMTGSSAFPVFDMFRRPCNIAGGSLRAVESSLDSWSGIAPSGTRREMVREEGECSIDHWSEGAEAGTSYAGSDIMADAGTMPPLPFADNYSMAASHFRPESIEEQMMYSMAVSLAEAHGRTHTQGLTWL

SEQ ID NO: 26 - protein, 600 aa, Physcomitrella patens subsp. patens
MGNKITRRRTVIDERYTRPQGLYPHRDVDQRKLRRLILESKLAPCFPGAEEPATDLEECPICFLHYPSVNRSKCCTKGICTECFLQMKSPHVARPTQCPFCKTPQYAVEYRGAKTLEEKGMEQAEEQKVIEAKIRMRQQELLDDEEREQRREENIRAGRIRLQTPRSQPVTNNEIASAPTDEINFLDWGYGDRQPQVLETLDSRESNAPRLNPYLWVEGDYRRSGGFDAAAPSQQSAEPNTVPALSQQQPEIGVPTLQAPSGAIRARHRDDDFDLDLEDIMVMEAIWLSIQEQGARHRFSDGEATRSVPNRPAGLALENSFSSELDGTNTRAPPPPAVPEPESWHQHSGRQGTAAVGLAGAIAALAEQQAVSPNTTHAIHPTVTSSLQPSLSDDHSVPEVSNINEEPLVSTGDAPASQAHESSQRSEELPQSGRENGVREMPVVVSTSGRGKSDAENSSRAFEKLANWVSSTQKEYKGSSVNTWLGDQSSERVEVGTSFSSSVPSASDLPWEAPDIPSDSRNGESSGGFNNDKVLVPDSFEEQMMLAMALSLADAQARVRHGGNHSGPLPQATHFTDAQARVRQGISRSGPLPRPTYIGQ

SEQ ID NO: 27 - protein, 155 aa, Physcomitrella patens subsp. patens
MGNKVTRRCSTVDERYTRLQGLYPQRGVDQKKLRRLILDSKLAPCFPGEEEANADFEECPICFLSYPSLNRSKCCSKGVCTECFLQMKSPRTARSIQCPFCKSYNYGVEYRGVKSLEEKGIEAAEEQKVIEAKIRMRKREILDDEHREQRKEEGC

SEQ ID NO: 28 - protein, 83 aa, Physcomitrella patens subsp. patens
MGNKITRRRHVIDERYTRPQGLYPHRDVDQRKLRRLILESKLAPCFPGEEESATDLEECPICFLHYPSLNRSKCCTKGICTGT

SEQ ID NO: 29 - protein, 513 aa, Candida albicans SC5314
MGNVPAKETRSRSSSSVSDYRNSTSSTTHGSSSSTSSKRRNTTSSLYGIVSSATSSSNHHNRSGSHDLRKLKRQEEKEQAQIQHYMQLIVKFNESVDGGYLAPFGTYKSNLDYDCDIVRNLIINRKLSPFFTPLQDFDESWTDDELCILLGQLTLHALEPGYNNDDDEEEDDIDNHKIHKSANYYKRQEEKAKLKSLINKVKELQKDEEQKYFDEKQKNFNKDCPSRDLLLRLYRNASECPICFLYYPKHLNISRCCLQPICSECFVQIKRLDPHPPHDDQSNQEAGELPHRLISEPANCPYCASPDFGVTYEPPIDIHTGIDGIKPGDYKVSPPIVEESESAIDDDGDNSSNGSTTGKGEITSNSATAAAATATPPPVNSLSPRKNSLKKRRGSLAANAPGVITIDMIRPDWETKLNSARSKLARKAATASAIHASNLLLDDNSNSNSNNGNGNNSGNNRRRNNSSSGRSGSFGGSNNRYATVEQRMIEEAMRLSILDEEERKRNANKENKK

SEQ ID NO: 30 - protein, 609 aa, Ustilago maydis 521
MGQQQTKETGAAGSSAAQYSSHTRSSSRGMSPSVSANMIASLSAASLRPPSPPPLPAHLADSVKVDQGGLVPYGVYTGPKDYDQHFVRQSIVDRRLAPFCKGTDDEDELADSKFNSECPICFLNYPTPLNFSRCCHQPICTECFVQMKRADPTSTNPPSSEPRSCPFCVEPDFGVTYTPPESIEHARRSSASGGDSPNDATDAANFAEMAIGTGGAAVTGTGKKKILAADDPSVITVDQVRPDWHTKLAQAEAAVARRANRRVIMRQVGDRLIPIGISSSRMGADLAAAAESGRINLNGPGGSIILNDGQNWPGAAPVATSRRRSSRPSRGANDGVHELARLMRMGNGEDMEEAMIMEAMRLSLLEHEEQQRKQAEEEKKNKAAAAAAASATQGSMATSSRLSTSNDLSAGGSAANRFPVGAAQSVLEESEGSSSNAARSSPLAADAPTVPRLPPVSNVDPAALGLSQTTMDELRELIDADPMLPSSSDSAPSPMPVESGGLARPLRLVAAPESVPVPQPIAGLGSVLAEQHDPSISSQHGYPSPPPEVSGSAKHATSFSTTTTTPPLDAHASAPAVPGSSGFASAAAVPPSRIMNPNNPFRRSMGEQH

SEQ ID NO: 31 - protein, 561 aa, Coprinopsis cinerea okayama7#130
MGNSSSSSGRHQEDTVDYGALVPPGVYTGPRDWNQAIVSQLIAARKLAPFYRPLEEYDESWDDDQILAARKEFRDSSGDQPDSQSRSDHGSFSSSHHSSKSSHSKRPNGGKEFRPEVAVYRGAIECPICFLYYPPNINHSRCCDQAICTECFVQIKRAEPTTTHLVSEPAACPYCVQENFGIVYNPPPWRAGIGSEGASPITPADVNRRIEQSAIPYHKKRQKSYSADSPEVVTIDQIRPDWEAKLAAVRAAVARRANRRIIMRQVGDRLIPVGIGRVQTPEEAAEGGNSGSRRRRHHPANGELGTIVGMGGQDLEELMLMEAMRLSLIEHEEHQRREAEERKKKEAAERAAAAENGEGEPSDAQGAPSSSQAAPSSSSAAPPPSSSSNDPSGSLAPSGQHSRSPTPDSNNRTPPPFSTMNAALLTSGTATAFLNASSDPSSGSTTPSVPIPAVTLTGDAVPTTGPSPEAPSASSVSSSSVLTGDLPRPASLSSSTTPSSGSSLGPDPSLAGHAVYGTLPSSPESIGQSPPLEASSKSSNDRGNASLPSDSSPTDDGTAPR

SEQ ID NO: 32 - protein, 786 aa, Coccidioides immitis RS
MGNAATKESRSSQEHSARHSRGGSTASTAAYDHYRPSDGIHASSSRALRGGRSDFALLGLGAEREPVEHRRETRQEREARKREKENAARIKERQRSMKEEHVDGGYLVTQGVYVGTEDFNKAIVRQLMIERRLAPFWRGLNDFSESWTEHQLMAAARGMPIPAPDEVPPELEYKIPSKSSAEKQPPERNLNTLMVPITSRSQSYNSDTSSINRTISPARSPGALSPTNSFLRGRAKTLASLTTSSKTPASDMAPRELQLPKDPFVNGQPIEAYLYKDASECPICFLYYPPYLNKTRCCDQPICSECFVQIKRPDPHPPEHHDPNNSETTHPDEPEGQLVSEPAACPFCVQPEFGVMYTPPPFRRGLAYAASPGVHALANSSAASSASSLVSGGANPGTRRRAVSISADSPSVITTDRVRPDWATKLAAARAQAARRSAAATALHTAAYMMNNPGGPGEPRRRGMLRRTAGQDSPGGRTAPSHVNAMAYLAERRVVTDRDNASPVDSTTNLAPPRASSRRSRIDELEEMMMMEAIRLSLAAEEERRKKEEKETRKEAKRREKEAKKAEKSAKKAGLDSQNPSNLTSSTSSANSAVQTAGGANSELDMSANKGKGVDRSEPRPGVSTEAGSSTEPPKITIKDLKGEQFSSMLEGSSKNMHLRHVSSASSSNSSLVESAFGESIGSGTPHNGSSSSLAAIHGFRSLAAMIDDTPSGDSGESMNRPGSTNEQVQGAPAVKEPSENSAPNEPDQVTLLSSSPSLEQKDTLGKEVHMSSAEVLPQSSLGTAS

SEQ ID NO: 33 - protein, 497 aa, Yarrowia lipolytica CLIB122
MGNVPGKEQQVRNARSVSEDYHREGQVRSKRPSAPREKKREPRVFVDPNEQVDGGYLVPQGVYTGPQDFDILVVKSLMTSRKLAPFFKGLQDYEEEWTDHQLMAAIRGFPIPSAASESPTTESTDTKDASASTSTPHAISTPSHLSPPTAPPQVAISPPRHTLSSNNPFRDPLEHMSHLRIDLDNTTFSQSAPTPSWMRSGEPDQEDGDELINPGILQSPPSREAPKPPPSRQRAKTLTNKEPPLMVKIYRDPIECPICFLYYPNSLNMTRCCAQPICSECFVQMKRAEPHPRHDEPEPDTLLGQLDLISEPTACPYCAMSDFGVVYSPRHGPGAKAAGANSADAAAAKGNGDESAIDDSGDSSDGIDTTNMDDVADKLMHMSGAKRRSSISVTNPNVVTVDRVRPDWSKTLAAARARAARKAATANALHATAFVEGGNGEVAGSSRSSRRTRQNHEQRQAARAQELEQIMLSEAMRLSMLESQEAEEKRSREQESK

SEQ ID NO: 34 - protein, 476 aa, Ashbya gossypii ATCC 10895
MGNVPGKLEAEEYGAMNGRRGGSQKQFRSLSQSSTASSGSAAADSGRSRRATSLVGNLLSSGGVSRAESYGGSAYRRRVAREKDRLREQHALRLVVRSEETVDGGYLAPYGSYRLEKLDYDAPVVQGLIVERRLAPFYTPLQDFDEGWTREELVRVVDSLLLHAPFEEEPEEFEGVPLGNLGVADIDALVDKTLSRREQRRQRSKIFRARLHRKRILWQEEENSKFLELKLEARRTGVSSACLPSDDAKWDLYRNGAECPICFLYFPEPMNVSRCCLQPICTECFVQIKRQEPHWSHDEVDPAQPDEDKDPDLLISTPASCPFCATPNFGVTYKPPADRILGIQGGPPSSYVSACSDPPHHHTEPPPRRTSVAHDHSSVVTSDMIRPDWETELIKERTKLARRAANATAIHVSNRLVDPGHTRGYSNSFASASSTYASNSSMTADFEEEMIRHVMRLSLLDQQPNATSISPGPVDR

SEQ ID NO: 35 - protein, 583 aa, Thalassiosira pseudonana CCMP1335
MGNSSSSGGGSADRNSNADRSSGNTGSSSIGGGINNLSSRITGGGSNNNAHFRPSVHLPSSLVSLRGGTGSLGLSKTELDARCQPSGLYPSCEWEPKAIRRLVGDGKLAARLKGADSRITKTDRECPICFMYYSENNVTKCCRATICTECYLQIKPQKDKHTTCPFCNNPKMIILVQKGMDEGDIAKREEEEQRVIEATIRNRAAQMNVEVPASPSGDPTTSLNTDGDGASSTRSSFGSSLADYNRSRTFSNSESTVSAGSGDQGGAPTTPTRTGNDNDDAILSLAMSPEARRELEREMRAQLSHATHQRMESEAEEARLRHVQEWSRTDSGVRNRMREERLQELTALLERMSANDEGGGDDSTGEDRTVTDAARARGNAQTLGDLLRALETYGSEGQGRGRGRGGLDDLMRLEAAFILGMDDDYRRLRASGRSSARINDGAPFSIPLGGGRRVIARGLPRRAGGSSTHHMETAEMLMRGVSEEEQLAMAIEMSMRDAEEQAARQQQEGEGGTVAETVEEEGEDVHTESSASDDQATEDGEEGSLFGSSEGDSGDDEPNNPGVGTVGRVSLDEDEEEVVFETG

SEQ ID NO: 36 - protein, 72 aa, Chlamydomonas reinhardtii
PKIPEEYLRPHGLYDSSRVDVKKLRRLILNKQLAPCHPGAEECASGQDECPICFLYYPVLNTSLCCQKRVCT

SEQ ID NO: 37 - protein, 423 aa, Populus trichocarpa
MGNKLGRRRQVVDERYTRPQGLYVHKDVDHKKLRKLILESKLAPCFPGDEDSCNDHEECPICFLYYPSLNRSRCCMKGICTECFLQMKNPNSTRPTQCPFCKTSNYAVEYRGVKTKEEKGLEQIEEQRVIEAKIRMRQQELQDEEERMQKRLDVSSSSANIEPGELECGPTTVPSDTTPVESGEIVSSQYSSRRPPHAGANRDDEFDLDLEDIMVMEAIWLSIQENGRQKNPLCGDAAPPAQYTMEARYVTPAMAPPLAGSSSSPSGGLACAIAALAERQQTGGESIVHNSGNMPSFNMLPSTSSFYNRLEQDADNYSPAQSSSNVLPDCRMIVTRDDGEWGADRGSDAAEAGTSYASSETAEDAGGISSLLPPPPPTDEIGGSFQNVSGPIPESFEEQMMLAMAVSLAEARAMTSGPQSAWQ

SEQ ID NO: 38 - protein, 313 aa, Populus trichocarpa
MGNKLGRRRQVVDEMYTRPQGLYAHKDVDHKKLRKLILESKLAPCFPGDEDSCYDHEECPICFLYYPSLNRSRCCMKCVCTECFLQMKNPNSTRPTQCPFCKTANYAVEYRGVKTKEEKGLEQIEEQRVIEAKIRMRQQELQDDKERTQKRSEVSSSSTSIAPGELECGPAAVPSNRAPVESEDIVSSQYSIRHPLHSGGNRDDEFDLDLEDIMLMEAIWLSIQENGRQKNPLCGDAAPSEQFIMEARYASPAKAPLAGSSSPSGGLACAIAALAERQQMGGESLVHNNVNMPSFNMLPSTSSFYNRHVQDAD

SEQ ID NO: 39 - protein, 401 aa, Arabidopsis thaliana
MGNKLGRKRQVVEERYTKPQGLYVNKDVDVKKLRKLIVESKLAPCYPGDDESCHDLEECPICFLYYPSLNRSRCCMKSICTECFLQMKNPNSARPTQCPFCKTPNYAVEYRGVKSKEEKGIEQVEEQRVIEAKIRMRQKEMQDDEEKMQKRLESCSSSTSAMTGEMEYGSTSAISYNSLMDDGEIAPSQNASVVRQHSRPRGNREDEVDVDLEELMVMEAIWLSVQETGTQRNSASGEITSSRQYVTDNHSYVSSPPRVTPIVEPATPSSSSGGLSCAISALAERQMVGESSSHNHNHNVNVSSYSMLPGNCDSYYDIEQEVDGIDNHHHHRHHYEMGETGSSNSYVSSYMTGEGFHNFPPPPPLVIVPESFEEQMMMAMAVSMAEVHATTTCAPTEVTWQ

SEQ ID NO: 40 - protein, 430 aa, Arabidopsis thaliana
MGNKLGRKRQVVEERYTKPQGLYVNKDVDVKKLRKLIVESKLAPCYPGDDESCHDLEECPICFLYYPSLNRSRCCMKSICTECFLQMKNPNSARPTQKFLINLMGFFPFVSSLTFMRCPFCKTPNYAVEYRGVKSKEEKGIEQVEEQRVIEAKIRMRQKEMQDDEEKMQKRLESCSSSTSAMTGEMEYGSTSGFLFVPWFAAISYNSLMDDGEIAPSQNASVVRQHSRPRGNREDEVDVDLEELMVMEAIWLSVQETGTQRNSASGEITSSRQYVTDNHSYVSSPPRVTPIVEPATPSSSSGGLSCAISALAERQMVGESSSHNHNHNVNVSSYSMLPGNCDSYYDIEQEVDGIDNHHHHRHHYEMGETGSSNSYVSSYMTGEGFHNFPPPPPLVIVPESFEEQMMMAMAVSMAEVHATTTCAPTEVTWQ

SEQ ID NO: 41 - protein, 335 aa, Arabidopsis thaliana
MGNKLGRKRQIVDERYTKPQQGLYMSKDVDIKKLKKLILESKLAPCYPGLEETPSSHHDLEECPICFLYYPSLNRSRCCMKSICTECFLRMKSPNSAQPTQCPFCKTSNYAVEYRGGKTKEEKSFEQIEEQRVIEAKIRMRQKEVEDDEERMQKRLESYSSSSSTSAATLDTEYGSAAEDDEEIVSSQESCLPSHHPQVTRDGQFDFDLEDIMVMEAIWLSMQEPGIQRNTSPDDISEKDRNEEPSTPSSSSPSGGLACAIAVLAERQQMVGVSSSNQNVNLASQNLVPDNGNNSHYNAIEQDSNHYLQGAGISYTRSDMTDDSGGETSREVTWQ

SEQ ID NO: 42 - protein, 341 aa, Arabidopsis thaliana
MGNKLGRKRQIVDERYTKPQQGLYMSKDVDIKKLKKLILESKLAPCYPGLEETPSSHHDLEECPICFLFALSFWSSLHMKMSTFESSLSYVRCPFCKTSNYAVEYRGGKTKEEKSFEQIEEQRVIEAKIRMRQKEVEDDEERMQKRLESYSSSSSTSAATLDTEYGSAADHSFLAKVICTTVIRVGTLNLSGSYQVTDMWLSGKLFRDGQFDFDLEDIMVMEAIWLSMQEPGIQRNTSPDDISEKDRNEEPSTPSSSSPSGGLACAIAVLAERQQMVGVSSSNQNVNLASQNLVPDNGNNSHYNAIEQDSNHYLQGAGISYTRSDMTDDSGGETSREVTWQ

SEQ ID NO: 43 - protein, 290 aa, Arabidopsis thaliana
MGNKLGRKRQIVDERYTKPQQGLYMSKDVDIKKLKKLILESKLAPCYPGLEETPSSHHDLEECPICFLEEQRVIEAKIRMRQKEVEDDEERMQKRLESYSSSSSTSAATLDTEYGSAADHSFLAKVICTTVIRVGTLNLSGSYQVTDMWLSGKLFRDGQFDFDLEDIMVMEAIWLSMQEPGIQRNTSPDDISEKDRNEEPSTPSSSSPSGGLACAIAVLAERQQMVGVSSSNQNVNLASQNLVPDNGNNSHYNAIEQDSNHYLQGAGISYTRSDMTDDSGGETSREVTWQ

SEQ ID NO: 44 - protein, 230 aa, Brassica napus
  misc_feature (196)..(196): Xaa can be any naturally occurring amino acid
  unsure (1)..(230): unsure at all Xaa locations
MGNNLGKKRQVVDERYTKPQQGLLYMNKDVDFKKVKKLILDSKLAPCYPGAEETTCHDLEECPICYLYYPSLNRSRCCLKSICTECFLRMKNPSSSQPTQCPYCKTSNYAVEYRGGKTKEEKSIEQIEEQRVIEAKIRIRQKEVDEEKEERMQKRLESPSSSRTSEVTANTAYGSAADEDEETVSSQDSCVTSHPXVSRDGEFDYDLEDIMVMEAIWLSVQEPGSQMNNS

SEQ ID NO: 45 - protein, 113 aa, Glycine max
LESKLAPCYPGDEETAYDREECPICFLYYPSLNRSRCCTKSICTECFLQMKVPNSTRPTQCPFCKTANYAVEYRGVKSKEEKGLEQIEEQRVIEAKIRMRQQELQDEEERMHK

SEQ ID NO: 46 - protein, 60 aa, Glycine max
GQVVDEKYRRPQGLYNHKDVDHKKLRKLILESKLAPCYPGYEETTYDREECPICFLARLN

SEQ ID NO: 47 - protein, 101 aa, Medicago truncatula
MGNKLGRRRQVVDEKYTRPQGLYNHKDVDQKKLRKLILESKLAPCYPGDEETAVDREECPICFLYYPSLNRSRCCTKSICTECFLQMKVPNSTRPTQCPLL

SEQ ID NO: 48 - protein, 291 aa, Medicago truncatula
MRQQELQDEEERMHKRLEVSSSNVNVAVADVEYSSNAVAESSTSAIEHDEIVSSQDSCATPMVRPPPATRANRDDEFDVDLEDIMVMEAIWLSIQENGRQRNLSFADATSGHYVADDRYASSPMVQQAETSSSPSPSGGLACAIAALAERQQMSGESSVSSNNENTSFNMLPGSRRFYNRIGRDMVSYSPTENLDEGPPDDTMATTRSHGQWSIDHGSQVAETATSYANSVEGEDRGELSSMSQSNDNDGSFQSATEPIVPESFEEQMMLAMAVSLAEARAMPSGQSASWQ

SEQ ID NO: 49 - protein, 420 aa, Ricinus communis
MGNKLGRRRQVVDERYTRPQGLYVHKDVDHKKLRKLILESKLAPCYPGDDEFGNDHEECPICFLYYPSLNRSRCCMKGICTECFLQMKNPNSTRPTQCPFCKTTNYAVEYRGVKTKEEKGMEQIEEQRVIEAKIRMRQQELQDEEERMQKRLELSSSSSSIAPGEVECGSAAVQSFRSPLEAEGSIPSQFSIRHPPHYRANRDDEFDLDLEDIMVMEAIWLSIQENGRQKNPIYTDAASSENYAVQGHYALQAMPPVTESSSSPSGGLACAIAALAERQQTGGESFAHNNENVAACNMLPGGSSFYNRMDQDAENYSPAQGSNNMLSDCRMARDDVQWVADRGSDAAEAGTSYASSETTEDSDGISVVLPPPPLPPPDEIVGSDSGMIVPESFEEQMMLAMAVSLAEAQAMTGGAGSAWQ

SEQ ID NO: 50 - protein, 374 aa, Oryza sativa Indica Group
MGNRIGGRRKSGLEGEYYPSLNRSKCCSKGICTECFLQMKPTHTAQPTQCPFCKTPSYAVEYRGVKTKEERSIEQFEEQKVIEAQMRMRQQALQDEEDKMKRKQNRCSSSRTITPTKEVEYRDICSTSFSVPSYRCAEQETECCSSEPSCSAQTSMRPFHSRHNRDDNIDMNIEDMMVMEAIWRSIQEQGSIGNPVCGNFMPVTEPSPRERQPFVPAASLEIPHGGGFSCAVAAMAEHQPPSMDFSYMAGSSAFPVFDMFRRPCNIAGGSMCNLESSPESWSGIAPSCSREVVREEGECSADHWSEGAEAGTSYAGSDIVADAGTMPQLPFAENFAMAPSHFRPESIEEQMMFSMALSLADGHGRTHSQGLAWL

SEQ ID NO: 51 - protein, 423 aa, Oryza sativa Japonica Group
MGNRIGGRRKAGVEERYTRPQGLYEHRDIDQKKLRKLILEAKLAPCYMGADDAAAAADLEECPICFLYYPSLNRSKCCSKGICTECFLQMKPTHTAQPTQCPFCKTPSYAVEYRGVKTKEERSIEQFEEQKVIEAQMRMRQQALQDEEDKMKRKQNRCSSSRTITPTKEVEYRDICSTSFSVPSYRCAEQETECCSSEPSCSAQTSMRPFHSRHNRDDNIDMNIEDMMVMEAIWRSIQGSIGNPVCGNFMPVTEPSPRERQPFVPAASLEIPHGGGFSCAVAAMAEHQPPSMDFSYMAGSSAFPVFDMFRRPCNIAGGSMCNLESSPESWSGIAPSCSREVVREEGECSADHWSEGAEAGTSYAGSDIVADAGTMPQLPFAENFAMAPSHFRPESIEEQMMFSMALSLADGHGRTHSQGLAWL

SEQ ID NO: 52 - protein, 425 aa, Oryza sativa
MGNRIGGRRKAGVEERYTRPQGLYEHRDIDQKKLRKLILEAKLAPCYMGADDAAAAADLEECPICFLYYPSLNRSKCCSKGICTECFLQMKPTHTAQPTQCPFCKTPSYAVEYRGVKTKEERSIEQFEEQKVIEAQMRMRQQALQDEEDKMKRKQNRCSSSRTITPTKEVEYRDICSTSFSVPSYRCAEQETECCSSEPSCSAQTSMRPFHSRHNRDDNIDMNIEDMMVMEAIWRSIQEQGSIGNPVCGNFMPVTEPSPRERQPFVPAASLEIPHGGGFSCAVAAMAEHQPPSMDFSYMAGSSAFPVFDMFRRPCNIAGGSMCNLESSPESWSGIAPSCSREVVREEGECSADHWSEGAEAGTSYAGSDIVADAGTMPQLPFAENFAMAPSHFRPESIEEQMMFSMALSLADGHGRTHSQGLAWL

SEQ ID NO: 53 - protein, 370 aa, Oryza sativa
MGNRIGGRRKAGVEERYTRPQGLYEHRDIDQKKLRKLILEAKLAPCPFCKTPSYAVEYRGVKTKEERSIEQFEEQKVIEAQMRMRQQALQDEEDKMKRKQNRCSSSRTITPTKEVEYRDICSTSFSVPSYRCAEQETECCSSEPSCSAQTSMRPFHSRHNRDDNIDMNIEDMMVMEAIWRSIQEQGSIGNPVCGNFMPVTEPSPRERQPFVPAASLEIPHGGGFSCAVAAMAEHQPPSMDFSYMAGSSAFPVFDMFRRPCNIAGGSMCNLESSPESWSGIAPSCSREVVREEGECSADHWSEGAEAGTSYAGSDIVADAGTMPQLPFAENFAMAPSHFRPESIEEQMMFSMALSLADGHGRTHSQGLAWL

SEQ ID NO: 54 - protein, 365 aa, Oryza sativa
MGNRIGGRRKAGVEERYTRPQGLYEHRDIDQKKLRKLILEAKLAPCYMGADDAAAAADLEECPICFLEEQKVIEAQMRMRQQALQDEEDKMKRKQNRCSSSRTITPTKEVEYRDICSTSFSVPSYRCAEQETECCSSEPSCSAQTSMRPFHSRHNRDDNIDMNIEDMMVMEAIWRSIQEQGSIGNPVCGNFMPVTEPSPRERQPFVPAASLEIPHGGGFSCAVAAMAEHQPPSMDFSYMAGSSAFPVFDMFRRPCNIAGGSMCNLESSPESWSGIAPSCSREVVREEGECSADHWSEGAEAGTSYAGSDIVADAGTMPQLPFAENFAMAPSHFRPESIEEQMMFSMALSLADGHGRTHSQGLAWL

SEQ ID NO: 55 - protein, 428 aa, Sorghum bicolor
MGNRKGGRPKSGGEKRFTPPQGLYEHKDIDQKKLRKLILEAKLAPCYPGADDAAAAGGDLEECPICFLYYPSLNRSKCCSKGICTECFLQMKPTHTARPTQCPFCKTPNYAVEYRGVKTKEERSIEQFEEQKVIEAQLRMRQKELQDEEAKMKRKQSRCSSSRTVTPTTEVEYRDICSTSFSVPSYQCTEQGNECCSSEPSCSSQANMRPFHSRHNRDDNVDVNLEDMMVMEAIWRSIQEQGHLVNPVCGSYFPVIEPPSRERQAFLPAAPLEMPHPGGYSCAVAALAEHQPASMDFSYMAGSSTYPVFDMIRRPCNMSSGSLCGVENSSLDTWSGIAPSCSREVVREEGECSTDHWSEGAEAGTSYAGSDIMADTGTMQPLPFAENFTMAPSHFRPESIEEQMMFSMAVSLAEAHHGRTQAQGLAWL

SEQ ID NO: 56 - protein, 425 aa, Triticum aestivum
MGNRIGGRRKAGVEERYTRPQGLYEHRDIDQKKLRKLILEAKLAPCYPGADDAAGGDLEECPICFLYYPSLNRSKCCSKGICTECFLQMKPTHTARPTQCPFCKTPNYAVEYRGVKTKEERSIEQFEEQKVIEAQMRVRQQALQDEEDKMKRKQSRCSSSRTIAPTTEVEYRDICSTSYSVPSYQCTQQETECCSSEPSCSAQANMRSFHSRHTRDDNIDMNIEDMMVMEAIWRSIQQEQGSIGNPSCGSFMPFEQPTRERQAFVAAPPLEMPHPGGFSCAVAAMAEHQPSSMDFSYMTGSSAFPVFDMFRRPCNIAGGSMGAAESSPDSWSGIAPSCSRREVVREEGECSTDHLSEGAEAGTSYAGSDIVVDAGTMLPLPFADNYSMVASHFRPESIEEQMMYSMAVSLAEAHGRTHTQGLAWL

SEQ ID NO: 57 - protein, 433 aa, Pichia guilliermondii
MGNVPAKEGRSRSSTFSGTGAEIVTRSARRNTTSSADVKKSSRKSEEKDRLREKHWRDLVVRLHENVDGGYLAPYGTYKSNLDFDTEVVRRLVINRQLAPFYTPLNDFDPTWTTEELLVILSQLPLHSIEDAYSDAESEEDDVDNHKIHKSNNYYRRQEQKRKLKHSMETAKQAQKEEETALLHQKMLLKQGGQVSSSLPSKDLLLRLYSDASECPICFLYYPSNLNISRCCLQPICTECFVQIKRLDPHPPHDDASNQPNGDSLPHTLISEPAHCPYCAMADFGVIYDPLSDLRTGINGKCSPGEYRMPEHSDAKSDVQSVKKRPRRKSMAATDPGIITVDNIRPDWEQKLISAKNKLARKAAAASAIHASNLILNGDDSQTSSQQSRLRSRNSGGQTYNTIEERMIEEALRLSLLDEEERRRKERENSSKD

SEQ ID NO: 58 - protein, 428 aa, Zea mays
MGNRIGGRRKSGVEERFTRPQGLYDHKDIDQKKLRKLILEAKLAPCYPGADDAAPGGGDLEECPICFLYYPSLNRSKCCSKGICTECFLQMKPTHTARPTQCPFCKTPNYAVEYRGVKTKEERSIEQFEEQKVIEAQLRMRQKELQDEEAKMRRKQGRCSSSRTVTPTTEVEYRDICSTSFSVPSYQCTEQGNECCSSEPSCSSQANRRPFHSRHNRDDNVDMNLENMMVMEAIWRSIQQEQGHLVNPVCGSYFPVIEPPSRERQAFLPAAPLEMPHPGGYSCVAALAEHQPPSMDFSYMAGSSTYPVFDMIRRPCNMSSGSLCSVENSSLDTWSGMAPNYSRGVVREEGECSTDHWSEGAEAGTSYAGSDIMVDAGAMQPLPFAENFTMAPSHFRPESIEEQMMFSMAVSLAEGHHGRTQAQGLAWL

SEQ ID NO: 59 - protein, 631 aa, Arabidopsis thaliana
MASSLLRNPNLYSSTTITTTSFLPTFSSKPTPISSSFRFQPSHHRSISLRSQTLRLSCSISDPSPLPPHTPRRPRPEYIPNRISDPNYVRVFDTTLRDGEQSPGATLTSKEKLDIARQLAKLGVDIIEAGFPAASKDDFEAVKTIAETVGNTVDENGYVPVICGLSRCNKKDIERAWDAVKYAKRPRIHTFIATSDIHLEYKLKKTKAEVIEIARSMVRFARSLGCEDVEFSPEDAGRSEREYLYEILGEVIKAGATTLNIPDTVGITLPSEFGQLITDLKANTPGIENVVISTHCQNDLGLSTANTLSGAHAGARQMEVTINGIGERAGNASLEEVVMAIKCRGDHVLGGLFTGIDTRHIVMTSKMVEEYTGMQTQPHKAIVGANAFAHESGIHQDGMLKHKGTYEIICPEEIGLERSNDAGIVLGKLSGRHALKDRLTELGYQLDDEQLSTIFWRFKTVAEQKKRVTDADIIALVSDEVFQPEAVWKLLDIQITCGTLGLSTATVKLADADGKEHVACSIGTGPVDSAYKAVDLIVKEPATLLEYSMNAVTEGIDAIATTRVLIRGSNKYSSTNAITGEEVQRTFSGTGAGMDIVVSSVKAYVGALNKMMDFKENSATKIPSQKNRVAA

SEQ ID NO: 60 - protein, 2340 aa, Arabidopsis thaliana
  misc_feature (1271)..(1271): Xaa can be any naturally occurring amino acid
  misc_feature (1298)..(1298): Xaa can be any naturally occurring amino acid
  unsure (1)..(2340): unsure at all Xaa locations
MSSRENPSGICKSIPKLISSFVDTFVDYSVSGIFLPQDPSSQNEILQTRFEKPERLVAIGDLHGDLEKSREAFKIAGLIDSSDRWTGGSTMVVQVGDVLDRGGEELKILYFLEKLKREAERAGGKILTMNGNHEIMNIEGDFRYVTKKGLEEFQIWADWYCLGNKMKTLCSGLDKPKDPYEGIPMSFPRMRADCFEGIRARIAALRPDGPIAKRFLTKNQTVAVVGDSVFVHGGLLAEHIEYGLERINEEVRGWINGFKGGRYAPAYCRGGNSVVWLRKFSEEMAHKCDCAALEHALSTIPGVKRMIMGHTIQDAGINGVCNDKAIRIDVGMSKGCADGLPEVLEIRRDSGVRIVTSNPLYKENLYSHVAPDSKTGLGSRKESSFPRAVYNSNSISSNSTNANHFLRRISNFCETGDLDKSFRTVQEFVGDDESSSDAFLLVREALGLLLQASGKRKDIEMGRKIHQLVSGSTRLRNDDVLCTRIITMYAMCGSPDDSRFVFDALRSKNLFQWNAVISSYSRNELYDEVLETFIEMISTTDLLPDHFTYPCVIKACAGMSDVGIGLAVHGLVVKTGLVEDVFVGNALVSFYGTHGFVTDALQLFDIMPERNLVSWNSMIRVFSDNGFSEESFLLLGEMMEENGDGAFMPDVATLVTVLPVCAREREIGLGKGVHGWAVKLRLDKELVLNNALMDMYSKCGCITNAQMIFKMNNNKNVVSWNTMVGGFSAEGDTHGTFDVLRQMLAGGEDVKADEVTILNAVPVCFHESFLPSLKELHCYSLKQEFVYNELVANAFVASYAKCGSLSYAQRVFHGIRSKTVNSWNALIGGHAQSNDPRLSLDAHLQMKISGLLPDSFTVCSLLSACSKLKSLRLGKEVHGFIIRNWLERDLFVYLSVLSLYIHCGELCTVQALFDAMEDKSLVSWNTVITGYLQNGFPDRALGVFRQMVLYGIQLCGISMMPVFGACSLLPSLRLGREAHAYALKHLLEDDAFIACSLIDMYAKNGSITQSSKVFNGLKEKSTASWNAMIMGYGIHGLAKEAIKLFEEMQRTGHNPDDLTFLGVLTACNHSGLIHEGLRYLDQMKSSFGLKPNLKHYACVIDMLGRAGQLDKALRVVAEEMSEEADVGIWKSLLSSCRIHQNLEMGEKVAAKLFELEPEKPENYVLLSNLYAGLGKWEDVRKVRQRMNEMSLRKDAGCSWIELNRKVFSFVVGERFLDGFEEIKSLWSILEMKISKMGYRPDTMSVQHDLSEEEKIEQLRGHSEKLALTYGXKLISKVMEREIVVRDNKRFHHFKNGVXKQDAMKSSMSIIVFLFVTIFTISASSLNPEETCIQRNINRSQPPSSSLEPKTSKFDFLVDKLCRDMARAVMFSVRITGKFPSHYVKAMCNVFGNDEKKVKEYVVKKWLGGEKVLSNLVSKKDIYMASRNQEKSPKVQELYDLCKETFTGKAPSPASMAIQKLCSVLDSVSPADVGLEEVSQDDDRGYGVSGVSRFNRVGRWAQPITFLDIHECDTFTMCIFCFPTSSVIPLHDHPEMAVFSKILYGSLHVKAYDWVEPPCIITQDKGVPGSLPARLAKLVSDKVITPQSEIPALYPKTGGNLHCFTALTPCAVLDILSPPYKESVGRSCSYYMDYPFSTFALENGMKKVDEGKEDEYAWLVQIDTPDDLHMRPGSYTESSDEKISTTESNLAAATVTLKPSSLYLSETSPSMASSLLRNPNLYSSTTITTTSFLPTFSSKPTPISSSFRFQPSHHRSISLRSQTLRLSCSISDPSPLPPHTPRRPRPEYIPNRISDPNYVRVFDTTLRDGEQSPGATLTSKEKLDIARQLAKLGVDIIEAGFPAASKDDFEAVKTIAETVGNTVDENGYVPVICGLSRCNKKDIERAWDAVKYAKRPRIHTFIATSDIHLEYKLKKTKAEVIEIARSMVRFARSLGCEDVEFSPEDAGRSEREYLYEILGEVIKAGATTLNIPDTVGITLPSEFGQLITDLKANTPGIENVVISTHCQNDLGLSTANTLSGAHAGARQMEVTINGIGERAGNASLEEVVMAIKCRGDHVLGGLFTGIDTRHIVMTSKMVEEYTGMQTQPHKAIVGANAFAHESGIHQDGMLKHKGTYEIICPEEIGLERSNDAGIVLGKLSGRHALKDRLTELGYQLDDEQLSTIFWRFKTVAEQKKRVTDADIIALVSDEVFQPEAVWKLLDIQITCGTLGLSTATVKLADADGKEHVACSIGTGPVDSAYKAVDLIVKEPATLLEYSMNAVTEGIDAIATTRVLIRGSNKYSSTNAITGEEVQRTFSGTGAGMDIVVSSVKAYVGALNKMMDFKENSATKIPSQKNRVAA

SEQ ID NO: 61 - protein, 120 aa, Arabidopsis thaliana
MRMAMMPKKKKSSEEKKNGNITCGTLGLSTTTVKLADDDGKEHVACSIGNGPVDSSYKVVDLIIKLQKHIYKHSNWCSDAIATTRVFIRGRNKYSSTNAVTGEEVQKTFNGTGEGMAKKS

SEQ ID NO: 62 - protein, 506 aa, Arabidopsis thaliana
MASSLLTSSGMIPTTGSTVVGRSVLPFQSSLHSLRLTHSYKNPALFISCCSSVSKNAATSSTDLKPAVERWPEYLPNKLPDENYVRVFDTTLRDGEQAPGGSLTPPQKLEIARQLAKLRVDIMEVGFPGSSEEELETVKTIAKTVGNEVDEETGYVPVICAIARSKHRDIEAAWEAVKYAKRPRILIFTSTSDIHMKYKLKKTQEEVIEMAVSSIRFAKSLGFNDIQLGCEDGGRSDKDFLCKILGEAIKADVTVVNVADTVGINMPHEYAELVTYLKANTPGIDDVVFSVHCHNDLGLATANSIAGIRAGARQVEVTINGIGERSGNASLEEVVMALKCRGAYVINGVYTRIDTRQIMATSKMVQEYTGLYVQAHKPIVGANCFVHESGIHQDGILKNRSTYEILSPEDIGIVKSQNSGLVLGKLSGRHAVKDRLKELGYELDDEKLNAVFSLFRDLTKNKKRITDADMKALVTSSDGISLEKSNGANGLKSNGYIPVLQVSSNV

SEQ ID NO: 63 - protein, 396 aa, Arabidopsis thaliana
MDCNMVSSFPWDWENLIMSNQSKTENEKKQQSTEWEFEKGEGIESIVPDFLGFEKVSSGSATSFWHTAVSKSSQSTSINSSSPEDKRCNLASQSSPGDSSSNIDFLQVKPSTALEVPIASAESDLCLKLGKRTYSEEFWGRNNNDLSAVSMNLLTPSVVARKKTKSCGQSMQVPRCQIDGCELDLSSSKDYHRKHRVCETHSKCPKVVVSGLERRFCQQCSRFHAVSEFDEKKRSCRKRLSHHNARRRKPQGVFPLNSERVFDRRQHTSMLWNGLSLNTRSEEKYTWGTTYETKPTQMESGFTLSFQRGNGSEDQLFTGSTLSFSAFQTSGGFSAGKSNIQLPDKGVGECSGGLHESHDFYSALSLLSTTSDSQGIKHTPVAEPPPIFGTFPSHFI

SEQ ID NO: 64 - protein, 705 aa, Arabidopsis thaliana
MTARKRTPSVSNSEKLALPEPASSPTVQKTSVSGEDFQLAPPKLGVIFVISSLLCSLYLYLLCFHYNVDNELKRPILINAGLSLVGFFVTLKLIPVAARYVLRRNMFGFDINKRGTPQGEVRVPESLGIVVGIVFLIVAIVFQFFNFTEDSVWLVEYNAALASICFMILLGFVDDVLDVPWRVKLLLPSFATLPLLMAYAGHTTIVIPKPLVSYIGLEVFDLGRIYKLYMALLAVFCTNSINIHAGLNGLEIGQTVVIAAAILIHNVMQIGASVDTEYHQAHAFSIYLTQPLMATSLAMLAYNWYPSAVFVGDTYTVFAGMTMAVVGILGHFSETLLIFFLPQVLNFLLSLPQLAGIVKCPRHRLPKYDPATGLLTGTKDGTLVNVYLRIFGRKTEKSLCIHLLVFQALACAFCFMLRHFLAVIEAEMGRGKIAIKRINNSTSRQVTFSKRRNGLLKKAKELAILCDAEVGVIIFSSTGRLYDFSSSSWGAENPVPCRQRWLRWMLLGLHYLSTTLYNYETTLFFGSMKSVIERYSDAKGETSSENDPASEIQEMYIVTLEKYAYSEELVLDRQMMGEELSGLSVEALQNLENQLELSLRGVRMKKDQMLIEEIQVLNREGNLVHQENLDLHKKVNLMHQQNMELHEKVSEVEGVKIANKNSLLTNGLDMRDTSNEHVHLQLSQPQHDHETHSKAIQLNYFSFIA

SEQ ID NO: 65 - protein, 240 aa, Arabidopsis thaliana
  misc_feature (218)..(218): Xaa can be any naturally occurring amino acid
  unsure (1)..(240): unsure at all Xaa locations
MGRGKIAIKRINNSTSRQVTFSKRRNGLLKKAKELAILCDAEVGVIIFSSTGRLYDFSSSSMKSVIERYSDAKGETSSENDPASEIQFWQKEAAILKRQLHNLQENHRQMMGEELSGLSVEALQNLENQLELSLRGVRMKKDQMLIEEIQVLNREGNLVHQENLDLHKKVNLMHQQNMELHEKVSEVEGVKIANKNSLLTNGLDMRDTSNEHVHLQLXNRRHDHETHSKAIQLNYFSFIA

SEQ ID NO: 66 - protein, 243 aa, Arabidopsis thaliana
MPTLYKKAGCLGIRELMGRGKIVIQKIDDSTSRQVTFSKRRKGLIKKAKELAILCDAEVCLIIFSNTDKLYDFASSSVKSTIERFNTAKMEEQELMNPASEVKFWQREAETLRQELHSLQENYRQLTGVELNGLSVKELQNIESQLEMSLRGIRMKREQILTNEIKELTRKRNLVHHENLELSRKVQRIHQENVELYKKAYGTSNTNGLGHHELVDAVYESHAQVRLQLSQPEQSHYKTSSNS

SEQ ID NO: 67 - protein, 227 aa, Arabidopsis thaliana
MGRGKIVIQKIDDSTSRQVTFSKRRKGLIKKAKELAILCDAEVCLIIFSNTDKLYDFASSSVKSTIERFNTAKMEEQELMNPASEVKFWQREAETLRQELHSLQENYRQLTGVELNGLSVKELQNIESQLEMSLRGIRMKREQILTNEIKELTRKRNLVHHENLELSRKVQRIHQENVELYKKAYGTSNTNGLGHHELVDAVYESHAQVRLQLSQPEQSHYKTSSNS

SEQ ID NO: 68 - protein, 244 aa, Arabidopsis thaliana
MPTLYKKAGCLGIRELMGRGKIVIQRIDDSTSRQVTFSKRRKGLIKKAKELAILCDAEVGLIIFSSTGKLYDFASSSMKSVIDRYNKSKIEQQQLLNPASEVKFWQREAAVLRQELHALQENHRQMMGEQLNGLSVNELNSLENQIEISLRGIRMRKEQLLTQEIQELSQKRNLIHQENLDLSRKVQRIHQENVELYKKAYMANTNGFTHREVAVADDESHTQIRLQLSQPEHSDYDTPPRANE

SEQ ID NO: 69 - protein, 506 aa, Arabidopsis thaliana
MASSLLTSSVMIPTTGSTVVGRSVLPFQSSLHSLRLTHSYKNPALFISCCSSVSKNAATSSTDLKPVVERWPEYIPNKLPDGNYVRVFDTTLRDGEQSPGGSLTPPQKLEIARQLAKLRVDIMEVGFPGSSEEELETIKTIAKTVGNEVDEETGYVPVICAIARCKHRDIEATWEALKYAKRPRILVFTSTSDIHMKYKLKKTQEEVIEMAVSSIRFAKSLGFNDIQFGCEDGGRSDKDFLCKILGEAIKAGVTVVTIGDTVGINMPHEYGELVTYLKANTPGIDDVVVAVHCHNDLGLATANSIAGIRAGARQVEVTINGIGERSGNASLEEVVMALKCRGAYVINGVYTKIDTRQIMATSKMVQEYTGLYVQAHKPIVGANCFVHESGIHQDGILKNRSTYEILSPEDIGIVKSQNSGLVLGKLSGRHAVKDRLKELGYELDDEKLNAVFSLFRDLTKNKKRITDADLKALVTSSDEISLEKLNGANGLKSNGYIPVPQVSSNV

SEQ ID NO: 70 - protein, 503 aa, Arabidopsis thaliana
MASLLLTSSSMITTSCRSMVLRSGLPIGSSFPSLRLTRPYDKATLFVSCCSAESKKVATSATDLKPIMERRPEYIPNKLPHKNYVRVLDTTLRDGEQSPGAALTPPQKLEIARQLAKLRVDIMEVGFPVSSEEEFEAIKTIAKTVGNEVDEETGYVPVICGIARCKKRDIEATWEALKYAKRPRVMLFTSTSEIHMKYKLKKTKEEVIEMAVNSVKYAKSLGFKDIQFGCEDGGRTEKDFICKILGESIKAGATTVGFADTVGINMPQEFGELVAYVIENTPGADDIVFAIHCHNDLGVATANTISGICAGARQVEVTINGIGERSGNAPLEEVVMALKCRGESLMDGVYTKIDSRQIMATSKMVQEHTGMYVQPHKPIVGDNCFVHESGIHQDGILKNRSTYEILSPEDVGIVKSENSGIVLGKLSGRHAVKDRLKELGYEISDEKFNDIFSRYRELTKDKKRITDADLKALVVNGAEISSEKLNSKGINDLMSSPQISAVV

SEQ ID NO: 71 - protein, 631 aa, Arabidopsis thaliana
MESSILKSPNLSSPSFGVPSIPALSSSSTSPFSSLHLRSQNHRTISLTTAGKFRVSYSLSASSPLPPHAPRRRPNYIPNRISDPNYVRIFDTTLRDGEQSPGATLTSKEKLDIARQLAKLGVDIIEAGFPAASKDDFEAVKTIAETVGNTVDENGYVPVICGLSRCNKKDIETAWEAVKYAKRPRIHTFIATSDIHLKYKLKKSKEEVIEIARNMVRFARSLGCEDVEFSPEDAGRSEREYLYEILGEVIKAGATTLNIPDTVGITLPSEFGQLIADIKANTPGIQNVIISTHCQNDLGLSTANTLSGAHSGARQVEVTINGIGERAGNASLEEVVMAIKCRGDHVLGGLFTGIDTRHIVMTSKMVEEYTGMQTQPHKAIVGANAFAHESGIHQDGMLKHKGTYEIMSPEEIGLERSNDAGIVLGKLSGRHALKDRLNELGYVLDDGQLSNLFWRFKAVAEQKKRVTDADLIALVSDEVFQPEAVWKLLDMQITCGTLGLSTSTVKLADSDGKEHVACSVGTGPVDAAYKAVDLIVKEPATLLEYSMNAVTEGIDAIATTRVLIRGDNNYSSTNAVTGESVERTFSGTGAGMDIVVSSVKAYVGALNKMLGFKEHTSTLSKTPLETNEVPA

SEQ ID NO: 72 - protein, 234 aa, Arabidopsis thaliana
MGRGKIVIRRIDNSTSRQVTFSKRRSGLLKKAKELSILCDAEVGVIIFSSTGKLYDYASNSSMKTIIERYNRVKEEQHQLLNHASEIKFWQREVASLQQQLQYLQECHRKLVGEELSGMNANDLQNLEDQLVTSLKGVRLKKDQLMTNEIRELNRKGQIIQKENHELQNIVDIMRKENIKLQKKVHGRTNAIEGNSSVDPISNGTTTYAPPQLQLIQLQPAPREKSIRLGLQLS

SEQ ID NO: 73 - protein, 240 aa, Arabidopsis thaliana
MGRGKIAIKRINNSTSRQVTFSKRRNGLLKKAKELAILCDAEVGVIIFSSTGRLYDFSSSSMKSVIERYSDAKGETSSENDPASEIQFWQKEAAILKRQLHNLQENHRQMMGEELSGLSVEALQNLENQLELSLRGVRMKKDQMLIEEIQVLNREGNLVHQENLDLHKKVNLMHQQNMELHEKVSEVEGVKIANKNSLLTNGLDMRDTSNEHVHLQLSQPQHDHETHSKAIQLNYFSFIA

SEQ ID NO: 74 - protein, 139 aa, Brassica napus
  misc_feature (12)..(12): Xaa can be any naturally occurring amino acid
  misc_feature (56)..(56): Xaa can be any naturally occurring amino acid
  misc_feature (71)..(71): Xaa can be any naturally occurring amino acid
  misc_feature (128)..(128): Xaa can be any naturally occurring amino acid
  unsure (1)..(139): unsure at all Xaa locations
ITCGTLRLSTAXVNLADADAKEHCACSMRTGLVDSAYKAVDLIVKEPATLLEYSMXNAVTEGIDAIATTRXVLVRGNNTYTSTNAITGEEVLRTFSGTGAGMDIVVSSVKAYVGALNKMLDFKEKSPXKVPSRNIKVTA

SEQ ID NO: 75 - protein, 284 aa, Brassica napus
MMFEKDDLGLSLGLNLPKKQMNLKSNPSVSLTPSSSSFGLLRRSSLNESFNSSVPYSDSSRVETRTFIRGIDVNQPPSTAEYGDKDAGVSSPNSTVSSSTGKRSEREEDTDPQGSRGISDDEDGDNSRKKLRLSKDQSAILEETFKDHSTLNPKQKQALAKQLGLRARQVEVWFQNRRARTKLKQTEVDCEFLRRCCENLTDENRRLQKEVTELRSLKLSPQFYMHMNPPTTLTMCPSCEHVSVPPPPQVAASGHHQRSLPVNPWAPATRVSHGLTFDAFRPRS

SEQ ID NO: 76 - protein, 340 aa, Brassica napus
  misc_feature (33)..(33): Xaa can be any naturally occurring amino acid
  misc_feature (42)..(42): Xaa can be any naturally occurring amino acid
  misc_feature (82)..(82): Xaa can be any naturally occurring amino acid
  unsure (1)..(340): unsure at all Xaa locations
TKAAWESVKYAKRPRIVIFTSTSDIHLKYKLKXTREEVVEMXASSIRFAKSLGFEDIEFGCEDGGRSDKDYICKVFEEAIKXGATTLACPDTVGINMPHEYGKLVRYIKANTPGIDDVIFSAHCHNDLGVATANTIAGICAGARQVEVTINGIGERSGNAPLEEVVMALKCRGAFVMGGVYTRIDTRQIMATSKMVQEYTGLYVQPHKPIVGANCFVHESGIHQDGILKNRSTYEILSPEDVGVVKSQNSGIVLGKLSGRHAVKGRLKELGYGISDEKLNEVFSRFRDLTKQKKRVTDDDLRALVTCGDEIFSSEKLNGTNDNEINRNGYVPSPQISSVV

SEQ ID NO: 77 - protein, 183 aa, Brassica napus
SFCPGFGYWAGSEFGPICSQDISGGGETSRKKLRLSKDQSAFLEDTFKEHNTLNPKQKVALAKKLNMTARQVEVWFQNRRARTKLKQTEVDCEYLKRCVEKLTEENRRLQKEAMELRTLKLSPQFYGQMTPPTTLIMCPSCERVAGPSSNHHQTHRPVAINPWVARAGQVAHGLDFEALRPRS

SEQ ID NO: 78 - protein, 334 aa, Brassica napus
  misc_feature (47)..(47): Xaa can be any naturally occurring amino acid
  misc_feature (90)..(90): Xaa can be any naturally occurring amino acid
  unsure (1)..(334): unsure at all Xaa locations
MLDYEWDNTSAIMGSGEERHHHQDLDTTRALSIFDPTQTNHHQSPYXTFPPPLFSNQQHLTVVYGHQTAHNIPTNQFHHSFYDPNPYASXSSDSIYHAHSSASALFSFDQSGPAGSGSSYNFLVPKTEVDVSRSLDFSTSNRIGLNLGGRTYFSAGDDDFVSRLYRRSRPGELLGMGNSLSTTTTTPRCQAERCNADLSHAKHYHRRHKVCEFHSKASTVVAAGLSQRFCQQCSRFHLLSEFDNGKRSCRKRLADHNRRRRKCHQSASASGKHTPDIITTPKSANDSGVKSSSASPSSGPTPISLECFRQRQFQTTASSSTSAIWGSLAPTYNI

SEQ ID NO: 79 - protein, 174 aa, Brassica napus
PQGSRGISDDEDGDNSRKKLRLSKDQSAILEETFKDHSTLNPKQKQALAKQLGLRARQVEVWFQNRRARTKLKQTEVDCEFLRRCCENLTEKNRRLQKKVTELRSLKLSPQFYMHMNPPTTLTMCPSCEHVSVPPPPPQVAASGHHQRSLPVNPWAPATRVSHGLTFDAFRPRS

SEQ ID NO: 80 - protein, 170 aa, Brassica napus
RDLAAAARGEGDETEGERASCSHGGGSCGSDDEDGANRDGSRKKLRLSKEEALVLEETFKEHSTLNPKQKLALAKQLNLRTRQVEVWFQNRRARTKLKQTEVDCEYLKRCCDNLTDENRRLQKEVSGLRALKLSPNLYMQMTPTTLTMCPSCERVSASSSAVAAPPPPSS

SEQ ID NO: 81 - protein, 198 aa, Brassica napus
ELAILCDDDVGVIIFSSTGRLYDFSSSSMKSVIERYRDAKCDTNSEMNPASEIKFWQNEAAILKRQLHNLQENHRQMMGEELSGLSVEDLQKLENQLEMSLGDVRMKKEQMLVEEIKELNREGNLVHQENLELHKKVNVMHQQNMELHKKVSEVESVKSADKTSLLTNGLDMGGNSSEHVHLQLSQPQQHDETRSKAI

SEQ ID NO: 82 - protein, 274 aa, Brassica napus
MMMRKEDLGLSLSLGLSQDHTPLQSQNPNSSISNNLHRFPWNQTFASTSDLGKIDVNSLPRTVDCEEEPGVSSPNSTISSTISGGKRSEREGISEHDEITPDRGYSRGNSDEEEDGGETSRKKLRLSKDQSAFLEETFKEHNTLNPKQKLALAKKLSLTARQVEVWFRSGRARTKLKQTEVDCEYLKRCVEKLTEENRRLQKEAMELRTLKLSPQFYGQMTPPTTLIMCPSCERVAGPASNHQHNHRPVPVNPWVACAGQVTHGLNFEALRPRS

SEQ ID NO: 83 - protein, 238 aa, Glycine max
GRGKIVIRRIDNSTSRQVTFSKRRSGLLKKAKELAILCDAEVGVMIFSSTGKLYDFASSGMKSVIDRYNKSKEEPCQLGSSASVIKFWQREAAMLRQQLHNLQESHRKMMGEELSGLTVKELQNLENQLEISLRGVRMKKDQLLMDEIQELNRKGNLIHQENVELYQKVNLICQENMELKKKVYGTKDDNKTNRDSVLTNGLGIGEDLQVPVNLQLSQPQQQHYKEPSGTTKLGLQLH

SEQ ID NO: 84 - protein, 280 aa, Glycine max
RVSYVGPPPPQTVQHPSCQVEGCGLDLSSAKDYHRKHRVCEAHSKSPKVVIAGLERRFCQQCSRFHALSEFDDKKRSCRQRLSDHNARRRKTQPDSIQLNPSALSSSPYDGRQIMSPFAFSRTATNLAWQDMHSSKHPQTKEFLPKPAKAFNKIPSIVSMLSDDSSGLLTSRGIATKSIVPGMEVPNGTQDVNRALSLLSTNSSWCPYETKSLSLEHSTRTTHSITQHRLPLPSSEYWHTDQQNSSMCISFSDCDSSNRFQDFQLLSSPYESGFPCNQLD

SEQ ID NO: 85 - protein, 221 aa, Glycine max
MGRGKIVIRRIDNSTSRQVTFSKRRNGLVKKARELSILCDAEVGLIVFSSTGKLYDYASTSMKSVIERYNKVKEDHQQLINPASEVKLWQREVASLRQQVQYMQECHRQMMGQELSGLGIEELGNLEKRLEMSLKGVRMKKDQILIDEVKELHQKGSLAHQENVELNRKINLIRKENEELQKVIEAKCRKGVAASNPPFTINYGCNMLAPISLQLSLPEST

SEQ ID NO: 86 - protein, 383 aa, Glycine max
  misc_feature (83)..(83): Xaa can be any naturally occurring amino acid
  misc_feature (109)..(109): Xaa can be any naturally occurring amino acid
  misc_feature (257)..(257): Xaa can be any naturally occurring amino acid
  misc_feature (347)..(347): Xaa can be any naturally occurring amino acid
  unsure (1)..(383): unsure at all Xaa locations
FYPFPILSLSAPSSSTLTLTLIPSSSSCLPPLSYPSPSPSAFMTSREKLDVARQLAKLGVDIIEAGFPAASMDDCKVVKMIAXRVGNAVDDGYVPAICGLSRCNEKDIXTAWEAVKYAKRPRIHTFIATSALHMEYKLRMSKDKVVDIARNMAKFARSLGCDDVEFSPEDARRSDREFFYEILGEVIKVEATTLNIPDTVGITKSSEFGKLIADIQANNPGIENVIISTHCQNDLGLSTANTIEGARAGARQLEVTXINGIGERARNASLEEVVMASRCEAHVNGNLYTGINAKHIFLTSRMVEEYTGLRVQPHKALVGANAFAHESGIHWLCQNTYILVYLCNRTXTLDGMLKHKGTYEIISPEDIGLERTNEVGIVLGKLS

SEQ ID NO: 87 - protein, 617 aa, Glycine max
MATVIRNPILFPSTSHHPNQNHTFLTLRFSQTLRSSLRSKSRFAVSCSQSEPPPPHPSSSRRRPPYIPNLIPDPSYVRIFDTTLRDGEQSPGASMTSKEKLDVARQLAKLGVDIIEAGFPAASKDDFEAVKMIAQAVGNAVENDGYVPVICGLSRCNEKDIRTAWEAVKYAKRPRIHTFIATSPIHMEYKLRMSKDKVVDIARNMVKFARSLGCDDVEFSPEDAGRSDREFLYEILGEVIKVGATTLNIPDTVGITMPSEFGKLIADIKANTPGIENVIISTHCQNDLGLSTANTIEGARAGARQLEVTINGIGERAGNASLEEVVMALRCGAHVNGNLYTGINTKHIFLTSKMVEEYTGLQIQPHKALVGANAFAHESGIHQDGMLKHKGTYEIISPEDIGLERTNEAGIVLGKLSGRHALRKRLEELGYELNDDQVQTLFWCFKAVAEQKKRVTDADLRALVSDEVFQAEPVWKLGDLQVTCGTLGLSTATVKLLSSDGSTHVACSIGTGPVDSAYKAVDLIVKEQVTLLEYSMNAVTEGIDAIATTRVVIRGESETSTITTHALTGETVIRTFSGTGAGMDVVVSSVKAYIAALNKMSGFKESSQSAEKISISS

SEQ ID NO: 88 - protein, 238 aa, Glycine max
MGRGKIPIRRIENSTNRQVTFCKRRNGLLKKTRELSILCDAEVGVIVFSSTGKLYEYSNTSMETIIERFNKQNNNHHRLMDATSAIKGEAASLRQQLQHLQENHRQLMGEELSGLGINQLKHLENQLQMSLNNVRNKKDHIFSDEIKELQQKGSLIRRQNEELHKKIDLIHNENAELKKVIEARHKEEERAALKPPCAIKNRYDTLDPNSLQQRQSQPQPSEPSAEVMIMGYSLKLKM

SEQ ID NO: 89 - protein, 242 aa, Glycine max
YGCEKTTEGQAGLLKHRGTYEILSPEDIGHEKSNGVNMVLGKLSGRQALKSRLKELGYELRDEEVESVFRNFKAIAEKKKRVTDVDLKALVSDQASHAEPIWKLGGLQVTCGTMGSSTATIKLVTSDGSTHVACSVGVGPVDSAYKAINLIVKETVKVLEYSPSTVTGGTDAIATTRVVIRRENKQSPTPALNGNVIYPTFSGTGEGVDIDTSSVEAYITALNICSIQRMICICRKILAPKG

SEQ ID NO: 90 - protein, 567 aa, Glycine max
  misc_feature (132)..(132): Xaa can be any naturally occurring amino acid
  misc_feature (251)..(251): Xaa can be any naturally occurring amino acid
  misc_feature (286)..(286): Xaa can be any naturally occurring amino acid
  misc_feature (319)..(319): Xaa can be any naturally occurring amino acid
  misc_feature (322)..(322): Xaa can be any naturally occurring amino acid
  unsure (1)..(567): unsure at all Xaa locations
MGISSGYNPYSTQGKTSTDGTHPRSRPEYIPNHIPDPSYVRILDTTLRDGEQSPGAAMTSDQKLGIARQLVKLGVDIIDAGFPSASQEDFNAVKMIAQEVGNDCDADGYVPVIAALCRCNEKDITTAWEAVXYAKKPRLIPFIATSSIHMEYKLNKTKEEVLQIAIDMVKFTRSLGCDDIEFGVEDAARSDTEFLYKILEEVIKAGATTLCIADTVGITMPLEFGEMIAGIKANVPGVENAIISVHCHNDXGHATANTIQAACVGARQLEVTINGIGERAGNAAFXEVVMALKCRGDHALGGLYTGINTRHILKTSRMXEEXSGMYLQPHKALVGDNSFLHESGIHQAGLLKHRGTYEIISPEDIGHERSNGANMVLGKLSGRHALKNRLQELGYELRDDELESVFRNFKAMAGKKKRVTDVDLKALVSDQVCHVEPIWKLDDLQVTCGTMGSSTASVKLVTSHGSTHVACSVGVGPVDSAYKAIDLIVKETVKVLEYSPSTVTGGTDAIATTRVVIRRENKQSPTPALNGNVIYPTFSGTGEGVDIVTSSVEAYITALNKMLDSKE

SEQ ID NO: 91 - protein, 315 aa, Glycine max
  misc_feature (265)..(265): Xaa can be any naturally occurring amino acid
  unsure (1)..(315): unsure at all Xaa locations
MTVEKEDLGLSLSLSFPQNPPTHLHLNLVSSSPSSHNPQKPSWNDPFTSSAGSSFLRGIDVNRLPSVVDCEEEAGVSSPNSTVSSVSGKRSEREEANGEENDTDRACSRGIISDEEDAETSRKKLRLSKDQSIILEESFKEHNTLNPKQKLALAKQLGLRARQVEVWFQNRRARTKLKQTEVDCEFLKRCCENLTVENRRLQKEVQELRALKLSPQFYMHMTPPTTLTMCPSCERVAVPPSSAVDPAMRHHHVPPTQPRAFPIGXMGHRCRHYPAQALRCPPSQILTRRNKMTKFEKKKTVVIVGSHELCVQSVV

SEQ ID NO: 92 - protein, 285 aa, Glycine max
  misc_feature (256)..(256): Xaa can be any naturally occurring amino acid
  unsure (1)..(285): unsure at all Xaa locations
MTVQKEDLGLSLSLSFPLLSSSPSSHNPQKPSWNDPIFTSSGEAGSFLRGIDVNRLPSVVDCEEEAGVSSPNSTVSSVSGKRSERETNGEENDTDRACSRGIISDEEDAETSRKKLRLSKDQSIVLEESFKEHNTLNPKQKLALAKQLGLRARQVEVWFQNRRARTKLKQTEVDCEFLKRCCENLTEENRRLQKEVQELRALKLSPQFYMHMTPPTTLTMCPSCERVAVPPSSAVDPATRHHHVPPSHPRAFPIGXHGQALRCPPSQILDSRKQNDKIEKKDRKP

SEQ ID NO: 93 - protein, 292 aa, Glycine max
MGEKDDDFGLSLSLSLGRVNQQQQHPPPLNHMHQPQQLQPVPMNHNKTLFGDLSQLPADRSSEMIRGIDVNSAAECDGVSSPNSAVSSVSGGDGKQSERDDDNNAAAVAGERTSCSRGSDDDDGGGSDASRKKLRLTKEQSMVLEETFKEHSTLNPKRKQALAEELNLKPRQVEVWFQNRRARTKLKQTEVDCEYLKRCYENLTEENRRLHKEVQELRALKLSPQMYMHMNPPTTLTICPSCERTHSFASSSTATIHSAVAATSSNRKLFGTNIRLPVSFNTRPFEGPIPRP

SEQ ID NO: 94 - protein, 183 aa, Glycine max
  misc_feature (51)..(51): Xaa can be any naturally occurring amino acid
  misc_feature (133)..(134): Xaa can be any naturally occurring amino acid
  unsure (1)..(183): unsure at all Xaa locations
LKNRLQELGYELRDDELESVFRNFKAMAGKKKRVTDVDLKALVSDQVCHVXPIWKLDDLQVTCGTMGSSTASVKLVTVHGSTHVACSVGVGPVDAAYKAIDLIVKETVKVLEYTLNPVTEGTDAIATTRIVIXXRENNKTLTHALNGNFVYPTFSGTGEGVDVVVSSVEAYLTALNKMLDFKD

SEQ ID NO: 95 - protein, 224 aa, Glycine max
MHEFRSLLLDDIVLDVTCMLSGRHALRKRLEELGYELNDDQVQTLFWCFKAVAEQKKRVTDADLRALVSDEVFQAEPVWKLGDLQVTCGTLGLSTATVKLLSSDGSTHVACSIGTGPVDSAYKAVDLIVKEQVTLLEYSMNAVTEGIDAITTRVVAIRGESETSTITTHALTGETVIRTFSGTGAGMDVVVSSVKAYIAALNKMSGFKESSQSAEKISISSLKI

SEQ ID NO: 96 - protein, 264 aa, Glycine max
  misc_feature (227)..(227): Xaa can be any naturally occurring amino acid
  unsure (1)..(264): unsure at all Xaa locations
IPGSTHASAHASGEAGSFLRGIDVNRLPSVVDCEEEAGVSSPNSTVSSVSGKRSERETNGEENDTDRACSRGIISDEEDAETSRKKLRLSKDQSIVLEESFKEHNTLNPKQKLALAKQLGLRARQVEVWFQNRRARTKLKQTEVDCEFLKRCCENLTEENRRLQKEVQELRALKLSPQFYMHMTPPTTLTMCPSCERVAVPPSSAVDPATRHHHVPPSHPRAFPIGXHGQALRCPPSQILDSRKQNDKIEKKIGSHELCVQSVV

SEQ ID NO: 97 - protein, 443 aa, Glycine max
MECNAKSLGQWDWEHLFFFNTKAAENPRLQPTDCSSEADREINVGMLHPSGGSACSGSELIHASSSRSSKSASNNSSSNGDSKASILTLEGSHDDSTGKKELCNGEPIETSPAAVPSPVSGEPLLTLKLGKRLYFEDVCTGSDSKKPSSFDIPISSGKKHKTSSQTLQHPSCQVEGCGLDLSSAKDYHRKHRVCEAHSKSPKVVITGLERRFCQQCSRFHALSEFDDKKRSCRRRLSDHNARRRKPQPDSIQLNPSALSSSPYDGRQIVSPFAFSRTATNLAWQDMHPQTKEFLPKPAKAFNKIPSIVSMLSDDSSGLLTSRGIATKSTVPDVAGMEDPIRLSDPNGTQDVNRALSLLSTNSSSSWGAYETKSLSLEHSTRATHSITQHHLPLPSSAEYWHTDHQQHSSMCISFTDCDSSNRFQDFQLLSSPYESPFPCNQLD

SEQ ID NO: 98 - protein, 308 aa, Glycine max
MGEKDDGLGLGLSLKLGWGENNDNNNNQQQHPFNVHKPPQSVPNQRVSVNSLFHFHDRSSEMRSFFRGIDVNLPPPPPSAALAAFDDENGVSSPNSTISSISGKRSEREGNGEENERTSSSRGGGGSDDDEGGACGGDADADASRKKLRLSKEQALVLEETFKEHNTLNPRQKQALAKQLNLMPRQVEVWFQNRRARTKLKQTEVDCEYLKRCCENLTEENRRLQKEVQELRALKLSPQLYMQMNPPTTLTMCPSCERVAVSSASSSSSATMPSALPPANLNPVGPTIQRPMPVNPWAAMLNQHRGRP

SEQ ID NO: 99 - protein, 255 aa, Glycine max
  misc_feature (198)..(198): Xaa can be any naturally occurring amino acid
  unsure (1)..(255): unsure at all Xaa locations
MGRGKIVIRRIDNSTSRQVTFSKRRNGLLKKAKELAILCDAEVGVMIFSSTGKLYDFASSSMKSVMDRYSKSKEEPCQLGSSASEIKFWQREAAMLRQQLHNLQESHRRKMMGEELSGLTVKELQNLENQLEISLHGVRMKKDQLLMGEIQELNRKGNLIHQENVELYKKVYGTQDDNETNRDSVLTNGLGIGEDLQXACESPAKPATATATTLQGIFRNYKIGIAIALIHIQDVCVSQLLSRKMDSDLNLDVFV

SEQ ID NO: 100 - protein, 289 aa, Glycine max
  misc_feature (24)..(24): Xaa can be any naturally occurring amino acid
  unsure (1)..(289): unsure at all Xaa locations
MGEKDDDFGLSLSLSLGRVNQQQXTLLLNHMHQPQQLQPVPMNHNKTLFGDLFQLPDRSSEMVRGIDVNSAAEYDGVSSPNSAVSSVSGGGKQSERDDDNAAAVAGERTSCSRGSDDDDGGGSDAARKKLRLTKEQSMVLEETFKEHNTLNPKRKQALAEELNLKPRQVEVWFQNRRARTKLKQTEVDCEYLKKCCENLTEENRRLHKEVQELRALKLSPQMYMHMNPPTTLTMCPSCERTHSSASSSPATIHSTVAAATSSNCKLLGANIRRPVPVNTWPFEGPIPRP

SEQ ID NO: 101 - protein, 299 aa, Glycine max
MMVQKEDLGLSLSLNFPHHNTPNPQHPSLMSSSTHSSSPSGCNPQKPSWNEAFTSSDRNSDTCRGETRSFLRGIDVNRLPSAVDTEEETGVSSPNSTVSSVSGKRSEREEPNGEEHDMDRACSRGISDEEDAETARKKLRLSKDQSAILEESFKEHNTLNPKQKLALAKQLGLRPRQVEVWFQNRRARTKLKQTEVDCEVLKRCCENLTEENRRLQKEVQELRALKLSPQFYMQMTPPTTLTMCPSCERVAVPSSAVDAATRHHPMAQAQAQAQIRHRPIGPWASASPITHRPFDVFHH

SEQ ID NO: 102 - protein, 624 aa, Glycine max
MATVIRNPIPFPSTSHRPNQNHSNNTFLIFRFPQTSRSSLHSKSRFAFSCSQSEPPPPSPSASPRRRPPYIPNRIPDPSYVRIFDTTLRDGEQSPGASMTSKEKLDVARQLAKLGVDIIEAGFPAASKDDFEAVKMIAQEVGNAVDDDGYVPVICGLSRCNEKDIRTAWEAVKYAKRPRIHTFIATSAIHMEYKLRMSKDKVVDIARNMVKFARSLGCEDVEFSPEDAGRSDREFLYEILGEVIKAGATTLNIPDTVGITMPSEFGKLIADIKANTPGIENVIISTHCQNDLGLSTANTIEGARAGARQLEVTINGIGERAGNASLEEVVMALRCGAHVNGNLYTGINTKHIFLTSRMVEEYTGLQLQPHKALVGANAFAHESGIHQDGMLKHKGTYEIISPEDIGLERTNEAGIVLGKLSGRHALRKRLEELGYELSDDQVQTLFWRFKAVAEQKKRVTDADLRALVSDEVFQAEPVWKLGDLQVTCGTLGLSTATVKLLSSDGSTHVACSVGTGPVDSAYKAVDLIVKEPVTLLEYSMNAVTEGIDAIATTRVVIRGESETSTSTTHALTGEAVLRTFSGTGAGMDVVVSSVKAYIAALNKMLGFKETSPSAEKIPVSSLKI

SEQ ID NO: 103 - protein, 565 aa, Glycine max
MPTKTSTPSSQSPKLSHLRPQYIPNHIPDSSYVRILDTTLRDGEQSPGATMTAKEKLDIARQLVKLGVDIIQPGFPSASNSDFMAVKMIAQEVGNAVDDDGYVPVIAGFCRCVEKDISTAWEAVKYAKRPRLCTSIATSPIHMEHKLRKSKDQVIQIARDMVKFARSLGCNDIQFGAEDATRSDREFLYEILGVVIEAGATTVNIADTVGIVMPLELGKLIVDIKDNTPGIANVIISTHCHNDLGLATANTIEGARTGARQLEVTINGIGERAGNASLEEVVMALASKGDHALNGLYTRINTRHILETSKMVEEYSGMHLQPHKPLVGANAFVHASGIHQDGMLKHKGTYETISPEEIGHKRTTRIGIVLGKLSGSQALRKRLEELGYDLKEDEVDSVFWQFKAMAEKKKVVTDVDLKALVSYKAFHAESIWKLGDLQVTCGTIGLSTATVKLVNIDGSTHVACSIGIGAVDSTYKAINLIVKEPTKLLDYSLNSVTEGIGVNVTARVVICRENNHTSTYAFTEDANYPTFSGIAAEMDVVVSTVKAYLVALNKLLRWKESFRCA

SEQ ID NO: 104 - protein, 619 aa, Oryza sativa
  misc_feature (80)..(80): Xaa can be any naturally occurring amino acid
  misc_feature (175)..(175): Xaa can be any naturally occurring amino acid
  misc_feature (482)..(482): Xaa can be any naturally occurring amino acid
  misc_feature (531)..(531): Xaa can be any naturally occurring amino acid
  unsure (1)..(619): unsure at all Xaa locations
MASSLLSSPKPSSFSSANPTSTPRPRAQTLSPFRAAAPRFSHGLATAAAAANPSASRRCYHRAFARPVRASMAQPRRPEXYVPNRIDDPNYVRIFDTTLRDGEQSPGATMTSAEKLVVARQLARLGVDIIEAGFPASSPDDLDAVRSIAIEVGNTPVGEDGHVPVICGLSRCNKXRDIDAAWEAVRHARRPRIHTFIATSEIHMQHKLRKTPEQVVAIAKEMVAYARSLGCPDVEFSPEDAGREFLYHILEEVIKAGATTLNIPDTVGYTLPYEFGKLIADIKANTPGIENAIISTHCQNDLGLATANTLAGAHAGARQLEVTINGIGERAGNASLEEDGMLKYKGTYEIISPDDIGLTRANEFGIVLGKLSGRHAVRSKLVELGYEITDKEFEDFFKRYKEVAEKKKRVTDEDIEALLSDEIFQPKVFWSLADVQATCGTLGLSTATVKLIGPDGDEKIACAVGTGPVDAAYKAVDDIIQXIPTVLREYSMTSVTEGIDAIATTRVVVTGDVSDSKHALTGHSFNRAFRXVLYTTFFFHWAPSFCVVSNIYYCYYQLNFSHQLIISLPIDLSGSGAALDIVVSSVRAYLSALNKMSSFVGAIKASSEVSESQRVQTTE

SEQ ID NO: 105 - protein, 416 aa, Oryza sativa
MMNVPSAAAASSCDDFGYNATPPPPPSLLPIMDQDGGGGSIQRDHHHHHNHQQLGYNLEPSSLALLPPSNAAAAAAHHATIAHASPHDLLQFYPTSHYLAAAGGAGGGGNPYSHFTAAAAAGSTFQSYYQQPPQAAPEYYFPTLVSSAEENMASFAATQLGLNLGYRTYFPPRGGYTYGHHPPRCQAEGCKADLSSAKRYHRRHKVCEHHSKAPVVVTAGGLHQRFCQQCSRFHLLDEFDDAKKSCRKRLADHNRRRRKSKPSDGEHSGEKRRAQANKSAATKDKAGSSSKNAGIGDGFETQLLGGAHMSKDQDQAMDLGEVVKEAVDPKGKASMQQQQQQAHHGIHQQSHQQHGFPFPSSSGSCLFPQSQGAVSSTDTSNIAQVQEPSLAFHQQHHQHSNILQLGQAMFDLDFDH

SEQ ID NO: 106 - protein, 251 aa, Oryza sativa
MDWMPPPKPTSPRSPPLLWDWADAAVPGSSSGEVSAAAAAAAAHPGRRRKEKRGRAEEGGGGGGEVRCQVEGCGVELVGVKDYHRKHRVCEAHSKFPRVVVAGQERRFCQQCSRFHALSEFDQKKRSCRRRLYDHNARRRKPQTDVFSYASARPPSSLLFDDNRQISFVWNKAPLSHVRPFAISPWESSSEVGTTDGHIYLDKSHISKSLPAFNTDIDELLPMKDFSAATIWMFFGVLFIRTAQESCMSFH

SEQ ID NO: 107 - protein, 279 aa, Oryza sativa
MARQVLSSSLLPARPGHHPVPCKSSHSTQLSDAMVLESTREERRERLQGAMMERAEDLRLSLSLSSPLIAPQKRFLEMPLLPAAKRSEVVAAEEERAGLRGGGGSDEEDGGCGIDGSRKKLRLSKDQSAVLEDSFREHPTLNPRQKATLAQQLGLRPRQVEVWFQNRRARTKLKQTEVDCEFLKRCCETLTEENRRLQKEVQELRALKLVSPHLYMNMSPPTTLTMCPSCERVSNTNNNSTATAAKPLEFGGHATHAAAHHNLGSKSWGFFPAVLHAMF

SEQ ID NO: 108 - protein, 470 aa, Oryza sativa
  misc_feature (166)..(166): Xaa can be any naturally occurring amino acid
  unsure (1)..(470): unsure at all Xaa locations
MGSFGMDWNQKSSVLWDWENMPPIGNSANENPKNVMLAESKLAGVGVDIGHESGHSSGGTFSSSSEIGYGSSKSSISASIDSPSKVGNTIELNFASAEEHDKNMDKGKSKVDDTGTSRSPVVAANRVEPLIGLKLGKRTYFEDVCGGQNVKSSPSGVSVATPSPGXTKKVKVAQQNTQNPHCQVEGCNVDLSSAKPYHRKHRVCEPHSKTLKVIVAGLERRFCQQCSRFHGLAEFDQKKRSCRRRLHDHNARRRKPQPEAISLSSSRLSTLLYGADARQQASFLFGQAPYGQMGSCASSWDNPVPGGFKFTATKAPWSRPTIAAGVDGTHVSNQQASGNVLPHGAHHSFDGLMAFKETNAKVLNQGMEASAVASGSARGPDFEHALSLLSIDSVGAANLQPGSQIHPGVTAIAGTSNPVMMPSPAIWQGGLSLDQQAQFQAFDRLGNDDDEDHLQLPKPSYDNSHYDQMN

SEQ ID NO: 109 - protein, 489 aa, Oryza sativa
MCPQPDEPQALGANGVHQNGNGTTNGDHEGYRAFKTDQSKKVQSSNPYAPVGDFLSNVSKFKIIESTLREGEQFANAFFDTETKIRIAKALDDFGVDYIELTSPAASEQSRLDCEAICNLGLKAKILTHVRCNMQDAKLAVATGVDGVDVVIGTSSHLMEHSHGKDITYIKNTAIEVIEYVKSQGKEIRFSSEDSFRSDLVDLLTIYSAVDKVGVHRVGIADTVGCATPRQVYDLVRTLRGVVSCDIETHFHNDTGCAIANAYCALEAGATHIDTSVIGIGERNGITPLGGLMARMIVADRDYVKSKYKLEKLKEIEDIVAEAVEINIPFNNYITGFCAFTHKAGIHAKAILNNPSTYEIIDPKDFGMSRYVHFASRLTGWNAIKSRAEQLGLDMTDAQIKTVTLKIKAMADVRPLAIDDADSIIRTYHYNLNATQEKPLLQLTEEEKEKFAKAERELAQEDEKKALERKADDEADVPRAKKQKTETVA

SEQ ID NO: 110 - protein, 513 aa, Oryza sativa
MASFGMNWNQKSPVFWDWENPAPFGPNTMENPKSIPHPEPRGVVVAAANHGSTNSSGGTFTSSSELANGSSKSSLSASFDSSSKLGNSLEFRFASVKGHGKNMCKDGEAGRVEDSGTSPAVAVSHGEPVIGLKLGKRTYFENVCGGQNVKSSSAASGVTCPSTVVKKMKVSQQSTQSSYCQVEGCKVDLSSAREYHRKHKVCEAHSKAPKVIVSGLERRFCQQCSRFHGLAEFDQKKKSCRRRLSDHNARRRKPQQEAISFGSSRLATMFYDARQQTDIYFGQSPFGQVRSNAISSCDNLGGFKFTEAKLPWMKPMKTIGLEDLNFSTLQMPGNVVSHTVHHHDFDGLIPFKGNTPKVLNQACFMDKLEPQIVSQKNKNKNREARSTNYLLQAFWTSCLGVDPACAVVSSNSNGAPDLRRALSLLSSDSWGPADVQAGSQVHPGGVMPPLAVAAATVTAPTNPVSVMHALHPSTGGGGFWQDGDDPPPLDHASQAQAFMHPGNGSSSGYGHLH

SEQ ID NO: 111 - protein, 326 aa, Oryza sativa
MDWMPPPKPTSPRSPPLLWDWADAAVPGSSSGEVSAAAAAAAAHPGRRRKEKRGRAEEGGGGGGEVRCQVEGCGVELVGVKDYHRKHRVCEAHSKFPRVVVAGQERRFCQQCSRFHALSEFDQKKRSCRRRLYDHNARRRKPQTDVFSYASARPPSSLLFDDNRQISFVWNKAPLSHVRPFAISPWESSSEVGTTDGHIYLDKSHISKSLPAFNTDIDELLPMKGPDASLTASKFDGAPDLQRALSLLSSSSCGLPDPVQQASRVIQFTGASQNNRELPPLNGGNSASASCANVQTIAQPAQLVRFTMNASSNACQSNFFGLNQIN

SEQ ID NO: 112 - protein, 469 aa, Oryza sativa
MGSFGMDWNQKSSVLWDWENMPPIGNSANENPKNVMLAESKLAGVGVDIGHESGHSSGGTFSSSSEIGYGSSKSSISASIDSPSKVGNTIELNFASAEEHDKNMDKGKSKVDDTGTSRSPVVAANRVEPLIGLKLGKRTYFEDVCGGQNVKSSPSGVSVATPSPGLAKKVKVAQQNTQNPHCQVEGCNVDLSSAKPYHRKHRVCEPHSKTLKVIVAGLERRFCQQCSRFHGLAEFDQKKRSCRRRLHDHNARRRKPQPEAISLSSSRLSTLLYGDARQQASFLFGQAPYGQMGSCASSWDNPVPGGFKFTATKAPWSRPTIAAGVDGTHVSNQQASGNVLPHGAHHSFDGLMAFKETNAKVLNQGMEASAVASGSARGPDFEHALSLLSIDSVGAANLQPGSQIHPGVTAIAGTSNPVMMPSPAIWQGGLSLDQQAQFQAFDRLGNDDDEDHLQLPKPSYDNSHYDQMN

SEQ ID NO: 113 - protein, 344 aa, Oryza sativa
MECNPVSSSTTSSSLLWDWDATASAEPPPPPGKRGGRDSSSASASAKRGRSAAAAGDAAAVAAEAPRCQVEGCGLELGGYKEYYRKHRVCEPHTKCLRVVVAGQDRRFCQQCSRFHAPSEFDQEKRSCRRRLSDHNARRRKPQTDVFAFGSGTLPRSLFDDRQQISFAWDNNAPLNHANTTSSSSWTSDLQLSQVMDISKRSRKAGADSANIRLSNALPTLCHDTNELLPIKGADASETASKLDGALDVQRALSLLSASSRGLTDPGHQTSSIIQFTNSNQNSTLPSVPSEGNSNVPFWVDGQHQAVEPQVFQFTMDTGNTVFPDLERIKPSYESSMFGLNQIH

SEQ ID NO: 114 - protein, 475 aa, Oryza sativa
MASFGMNWNQKSPVFWDWENPAPFGPNTMENPKSIPHPEPRGVVVAAANHGSTNSSGGTFTSSSELANGSSKSSLSASFDSSSKLGNSLEFRFASVKGHGKNMCKDGEAGRVEDSGTSPAVAVSHGEPVIGLKLGKRTYFENVCGGQNVKSSSAASGVTCPSTVVKKMKVSQQSTQSSYCQVEGCKVDLSSAREYHRKHKVCEAHSKAPKVIVSGLERRFCQQCSRFHGLAEFDQKKKSCRRRLSDHNARRRKPQQEAISFGSSRLATMFYDARQQTDIYFGQSPFGQVRSNAISSCDNLGGFKFTEAKLPWMKPMKTIGLEDLNFSTLQMPGNVVSHTVHHHDFDGLIPFKGNTPKVLNQGVDPACAVVSSNSNGAPDLRRALSLLSSDSWGPADVQAGSQVHPGGVMPPLAVAAATVTAPTNPVSVMHALHPSTGGGGFWQDGDDPPPLDHASQAQAFMHPGNGSSSGYGHLH

SEQ ID NO: 115 - protein, 666 aa, Oryza sativa
MASSLLSSPKPSSFSSANPTSTPRPRAQTLSPFRAAAPRFSHGLATAAAAANPSASRRCYHRAFARPVRASMAQPRRPEYVPNRIDDPNYVRIFDTTLRDGEQSPGATMTSAEKLVVARQLARLGVDIIEAGFPASSPDDLDAVRSIAIEVGNTPVGEDGHVPVICGLSRCNKRDIDAAWEAVRHARRPRIHTFIATSEIHMQHKLRKTPEQVVAIAKEMVAYARSLGCPDVEFSPEDAGRSNREFLYHILEEVIKAGATTLNIPDTVGYTLPYEFGKLIADIKANTPGIENAIISTHCQNDLGLATANTLAGAHAGARQLEVTINGIGERAGNASLEEVVMAIKCRRELLGGLYTGINTQHITMSSKMVQEHSGLHVQPHKAIVGANAFAHESGIHQDGMLKYKGTYEIISPDDIGLTRANEFGIVLGKLRLNIAHLTLRKALPGLLGYEITDKEFEDFFKRYKEVAEKKKRVTDEDIEALLSDEIFQPKVFWSLADVQATCGTLGLSTATVKLIGPDGDEKIACAVGTGPVDAAYKAVDDIIQVTVAIFFIVLALVYQFMGWNMDVFIQYIPTVLREYSMTSVTEGIDAIATTRVVVTGDVSDSKHALTGHSFNRAFSGSGAALDIVVSSVRAYLSALNKMSSFVGAIKASSEVSESQRVQTTE

SEQ ID NO: 116 - protein, 645 aa, Oryza sativa
  misc_feature (282)..(282): Xaa can be any naturally occurring amino acid
  misc_feature (292)..(292): Xaa can be any naturally occurring amino acid
  misc_feature (314)..(314): Xaa can be any naturally occurring amino acid
  misc_feature (325)..(325): Xaa can be any naturally occurring amino acid
  misc_feature (335)..(335): Xaa can be any naturally occurring amino acid
  misc_feature (364)..(364): Xaa can be any naturally occurring amino acid
  misc_feature (375)..(375): Xaa can be any naturally occurring amino acid
  misc_feature (398)..(398): Xaa can be any naturally occurring amino acid
  misc_feature (407)..(407): Xaa can be any naturally occurring amino acid
  unsure (1)..(645): unsure at all Xaa locations
MASSLLSSPKPSSFSSANPTSTPRPRAQTLSPFRAAAPRFSHGLATAAAAANPSASRRCYHRAFARPVRASMAQPRRPEYVPNRIDDPNYVRIFDTTLRDGEQSPGATMTSAEKLVVARQLARLGVDIIEAGFPASSPDDLDAVRSIAIEVGNTPVGEDGHVPVICGLSRCNKRDIDAAWEAVRHARRPRIHTFIATSEIHMQHKLRKTPEQVVAIAKEMVAYARSLGCPDVEFSPEDAGRSNREFLYHILEEVIKAGATTLNIPDTVGYTLPYEFGKLIAXDIKANTPGIXTNAIISTHCQNDLGTSQTANTXLAGAHAGARQXLEVTINGIWXTGLGNASLEEVVMAIKCRRELLGGLYTGXINTQHITMSSXHMVQEHSGLHVQPHKAIVGANAXFAHESGIHXQDGMLKYKGTYEIISPDDIGLTRANEFGIVLGKLSGRHAVRSKLVELGYEITDKEFEDFFKRYKEVAEKKKRVTDEDIEALLSDEIFQPKVFWSLADVQATCGTLGLSTATVKLIGPDGDEKIACAVGTGPVDAAYKAVDDIIQIPTVLREYSMTSVTEGIDAIATTRVVVTGDVSDSKHALTGHSFNRAFSGSGAALDIVVSSVRAYLSALNKMSSFVGAIKASSEVSESQRVQTTE

SEQ ID NO: 117 - protein, 247 aa, Oryza sativa
MMERAEDLRLSLSLSSPLIAPRTHHVAMLFHAPPEKRFLEMPLLPAAKRSEVVAAEEERAGLRGGGGSDEEDGGCGIDGSRKKLRLSKDQSAVLEDSFREHPTLNPRQKATLAQQLGLRPRQVEVWFQNRRARTKLKQTEVDCEFLKRCCETLTEENRRLQKEVQELRALKLVSPHLYMNMSPPTTLTMCPSCERVSNTNNNSSAAAAADRRGIRTTTAAGGGSVVDTAADGGILCHRPIAVRPQQS

SEQ ID NO: 118 - protein, 170 aa, Triticum aestivum
GLVPNSARGIEALLSDEIFQPKVFWSLADVQATCGTLGLSTATVKLIGPDGEEKIACAVGTGPVDAAYKAVDDIIQIPTVLREYSMTSVTEGIDAIATTRVVVTGDVSDSKHALTGHSFSRAFSGSGAALDIVVSSVRAYLSALNKMSSFVGAIKASSEVSESQRVQTTE

SEQ ID NO: 119 - protein, 627 aa, Triticum aestivum
MASSSAKPYCCSSLNPAPSNPLARRAALSVLPAAKPRRFSHGLAAVAANPRASRSAVLRPVRACLAAPRRPEYVPDRIDDPNYVRIFDTTLRDGEQSPGATMTSAEKLVVARQLARLGVDIIEAGFPASSPDDLDAVRSIAIEVGNTPVGEDGHVPVICGLSRCNKRDIDAAWEAVRHARKPRIHTFIATSEIHMQHKLRKTPDQVVAIAREMVAYARSLGCPDVEFSPEDAGRSNREFLYHILEEVIKAGATTLNIPDTVGYTLPHEFGKLIADIKANTPGIENAIISTHCQNDLGLASANTLAGAYAGARQLEVTINGIGERAGNASLEEVVMAIKCRRELLGGLHTGINSQHITMTSKMVQEHSGLHVQPHKAIVGANAFAHESGIHQDGMLKFKGTYEIISPDDIGLTRANEFGIVLGKLSGRHAVRTKLVELGYEINDKEFEDFFKRYKEVAEKKKRVTDEDIEALLSDEIFQPKVIWSLGDVQATCGTLGLSTATVKLITIDGEEKIGCSVGTGPVDAAYKAVDQIIQIPTVLREYSMTSVTEGIDAIATTRVVIAGDVSADKPALTSNSNRSFSGSGAAMDVVVSSVRAYLSALNKMSSYVGAVKASSEAPETISVQTTE

SEQ ID NO: 120 - protein, 479 aa, Triticum aestivum
MGSFGMEWNQRSSVLWDWENFPPIGENPKNAMQADPRFAAVAATMGNEPLHSSGGSGSGSGSGNFSSSSEMGYGSSKSSMSASIDSSNRAGNNMEFRFAPVKNPDRNTSKNTELGKVDNTRTGTSPSPVVAVSSGEPVIGLKLGKRTYFEDVCGGQNVKSSPSGAASAPNKSPALGKKAKAEQQKPHNSYCQVEGCKVDLSSVKDYHRKHRVCELHSKAPKVVVAGLERRFCQQCSRFHALAEFDQKKRSCRRRLNDHNSRRRKPQPEAISFSSSRMSTMFYDARQQPNFLFGQAPYVQMRSCGSSSWDDPGGFKVTHTKAPWLKPTTAAGVHGIHLSSQQMSDNIMPHGAHHGFDGFMAFKGTCTKFPNQGVQASAVASDSSGAPDLQHALSLLSSNPVGAANLQPSPQMHSGVAAIAGAPNPAMHALGSSTGLWLDGSQPLDDHPRFQVFERLGDHDSELQLPKPSYDHASHFDRMH

SEQ ID NO: 121 - protein, 141 aa, Triticum aestivum
NKFVQKSRLVPVRNSRDIVDPRVREKIGCSVGTGPVDAAYKAVDQIIQIPTVLREYSMTSVTEGIDAIATTRVVITGDVSADKPALTSNSNRSFSGSGAAMDVVVSSVRAYLSALNKMSSYVGAVKASSEAPETISVQTTE

SEQ ID NO: 122 - protein, 232 aa, Triticum aestivum
MGRGKIVIERIDNPTNRQVTFSKRRGGLMKKARELAILCDADLALIVFSSTGRLYDFASSSGMEAILERYQEAKEEHYGVLNPTSEAKLWQREVTTLRQQVQNLQHNNRQLLGEELSGTTARDLLFLVNQVETSLHSVRKRKEQLMAAEIHELNQKGFHIQKENVELGKKLGIAHEHKIEPQKKLSGVMRTSEQQASGSSSKAAAGLLLSTRAREPRIFIDLELRQQKHEDE

SEQ ID NO: 123 - protein, 237 aa, Triticum aestivum
MEWTAPKSTPLSPPHLLWDWGDAAAPGSSGEAAGRRGKEKRARGEGAGGGGGGGGGGVRCQVEGCGVELRDAKEYHRKHRVCEAHTKSPRVVVAGQERRFCQQCSRFHGLSEFDQKKRSCRRRLSDHNARRRKPQPDAFSFAPARLPSSLMFDDRRQISFVWNKDPLSHGRPFPCSPWDSPSDFKLPQVKEIREVSINGQVHFDKSHLPNAVPALSHDIPAAATNERSGRICNRFEN

SEQ ID NO: 124 - protein, 419 aa, Triticum aestivum
DFLSNISSFKIIESTLREGEQFANAFFDTEKKIEIAKALDDFGVDYIELTSPAASEQSRADCEAICKLGLKAKILTHIRCHMDDARIAVQTGVDGVDVVIGTSSYLMEHSHGKDMTYITNTAIEVINFVKSHNIEIRFSSEDSFRSNLVDLLSIYSTVDRIGVNRVGIADTVGCASPRQVYDLIRTLRGVVSCDIETHFHNDTGCAIANAYCALEAGATHIDTSVLGIGERNGITPLGGLMARMIVADREYVMGKYKLDKLKDIEELVAQAVEVNIPFNNYITGFCAFTHKAGIHAKAILKNPSTYEIINPSDFGMTRYIHFASRLTGWNAIKSRATQLNIEMTDVEYKECTQKIKALADIRPIAIDDADSIIRAFHRNIKQAEPIDLLPNMTEAEKILLAKKETEIKSCEKHAMDSET

SEQ ID NO: 125 - protein, 283 aa, Triticum aestivum
  misc_feature (8)..(8): Xaa can be any naturally occurring amino acid
  misc_feature (89)..(89): Xaa can be any naturally occurring amino acid
  misc_feature (213)..(213): Xaa can be any naturally occurring amino acid
  misc_feature (227)..(227): Xaa can be any naturally occurring amino acid
  misc_feature (229)..(229): Xaa can be any naturally occurring amino acid
  misc_feature (240)..(240): Xaa can be any naturally occurring amino acid
  misc_feature (248)..(248): Xaa can be any naturally occurring amino acid
  misc_feature (258)..(258): Xaa can be any naturally occurring amino acid
  unsure (1)..(283): unsure at all Xaa locations
PVGEDGHXPVICGLSRCNKRDIDAAWEAVRHARKPRIHTFIATSEIHMQHKLRKTPDQVVAIAREMVAYARSLGCPDVEFSPEDAGRSXRQLEVTINGIGERAGNASLEEVVMAIKCRRELLGGLHTGINSQHITMTSKMVQEHSGLHVQPHKAIVGANAFAHESGIHQDGMLKFKGTYEIISPDDIGLTRANEFGIVLGEAQWEGMLSEPNXWGLGYEINDKRIEXFXKPTKRCKRKRXVTDEDIEXMSDEIFSQRXWSLVIQHVETWLSHNVKLYMERRCR

SEQ ID NO: 126 - protein, 149 aa, Triticum aestivum
GHEALADVQATCGTLGLSTATVKLIAPDGEEKIGCSVGTGPVDAAYKAVDQIIQIPTVLREYGMTSVTEGIDAIATTRVVVTGDVTNNSKHALTGQSFNRSFSGSGAAMDIVVSSVRAYLSALNKMCSFAGAAKASSEVPESASVQRTE

SEQ ID NO: 127 - protein, 331 aa, Zea mays
MEWTVPKRAASPPSPPLLWDWGGDHAGATGSGSGSSGDAPARRGGREREAKRARADDGEVRCQVEGCGLDLSRVKEYHRKHRVCEAHTKSPRVVVAGQERRFCQQCSRFHALSEFDQKKRSCRRRLSDHNARRRKPQPDAFAFASARLPSSSFDDRRQISFVWNKAPVSHPFTSPWDSSSELPHAKEIREVSTKVGTITGQVHLDKSYVSNAVPSLTHGKDEPWPMKGPDMSIAASKFDGAPDLQRALSLLSVGACGLPDPVHQTSCVIQFTSASENSGDLHLSHGANSGLASCGDGQHIASQPQAQLVRFTMDTSNSVYEPSFFSVNQIN

SEQ ID NO: 128 - protein, 217 aa, Zea mays
MMERVEDLGLSLSLSSSLASPRTHHVATMLLRAPEKRFLEMPLLLPAKRTTEVTGEDGLRGGSDEEDGGCGIDGSRKKLRLSKDQSAVLEDSFREHPTLNPRQKAALAQQLGLRPRQVEVWFQNRRARTKLRQTEVDCEYLKRCCETLTEENRRLQKEVQELRALKLVSPHLYMHMSPPTTLTMCPSCERVSSSNGNSAAATAAALEYPSRGPSLRV

SEQ ID NO: 129 - protein, 480 aa, Zea mays
MGSFGMDWNQKASVLWDWENLPPVAVGASGSENPRMAAAPQALHSACGTISSSSEMGYGSSKSSVSASADDSSPKAKGKSMELNFAPDKVPDKNTDSGKVDDARTSPSSPVIAISSAEPVLSLKLGKRTYFEDVCGGQSVKSLPSDTSAVTPPPASPKKTKVTPNKKSYCQVEGCKVDLSSAKEYHRKHRVCEPHSKAPKVVVAGLERRFCQQCSRFHGLAEFDQKKKSCRRRLNDHNARRRKPQPEALSFGSSRLSAMFYDTRQHTSLLFGQGPYGQMRSCASSSWDNPGGGFKFAETKGPWLRAGGVDGLHQSSQQVWNNFMPHGVHQDFDGFTAFKGTNAKVLHQGVEASAVASNQNGAPQPDLHRALSLLSNSWAGAGTDQHPTAQLRHHAALSSSLAASSVSVAQASPAGLWQDGGGGATLSHHDYAHAQARFQAIDALGGAGAAAVAAGQELLQLPRPPSPYDGGSSSRYDLMR

SEQ ID NO: 130 - protein, 480 aa, Zea mays
MGSFGMDMDWNQKASVLLWDWENLPPAAANGSESHRTTAAAPQFAGLEATGHEPAPSSVSSSIHSLPSAKGNKNKNNMELISFAPAKAPDKDTGSVLSSGEPVVLGLKLGKRTYFEDGCGLGQSGKSSAALGTASAATPPGPAKKAKAAAAAPTAQQQKSYCQVEGCRTDLSSAKDYHRKHRVCEPHSKAPKVVVAGLERRFCQQCSRFHGLAEFDQKKKSCRRRLNDHNARRRKPQPEALPFGSSRLSAMFYDTRRQASLLFGESPYGQMRSCASSWWDSPGAGGGGFKFAETRGAPWLKPARAAADGLLPLSGQQQQQVWNDSIPHVAHQEDFDGFTVTAFKGISPKTLDHQGVEACAAVSSPDGAPDLQRALSLLSNSPAGGGGTNTNHPPPPPAAELHHHRAAPSSCLAAGSVSVLQEASSPGLWQDGGGSAALGHHAHARLQALDAAMATAQELLQLPRPPPSYGGSSSHYDLMR

SEQ ID NO: 131 - protein, 399 aa, Zea mays
MMNLSAAANGRDEFPPYVVPSNAAAPPPSLLPTMEQQQESSIHREHHQLLGYNLEANSLALLPPSNAAAAHHHTTFAGGHSPHDILHFYTPPPSAASHYLAAAAGNPYSHLVSAPGTTFHQTSSSYYPPAAAAQAAPEYYFPTLVSSAEENMASFAATQLGLNLGYRTYFPPRGGYTYGHHPPRCQAEGCKADLSSAKRYHRRHKVCEHHSKAPVVVTAGGLHQRFCQQCSRFHLLDEFDDAKKSCRKRLADHNRRRRKSKPSDADAGDKKRAHANKAAAAKDKAESSSKNMDIGDGLGAQILGSALLSKEQDQAMDLGEVVKEAVDPKGKASMQQHYGFPFHSSSAGSCFPQTQAVSSDTTSNIGQVQEPSLGFHHQHHQHSNILQLGQAMFDLDFDH

SEQ ID NO: 132 - protein, 439 aa, Zea mays
  misc_feature (316)..(316): Xaa can be any naturally occurring amino acid
  misc_feature (412)..(412): Xaa can be any naturally occurring amino acid
  unsure (1)..(439): unsure at all Xaa locations
MGSFGMNWNQKDPMVWDWEHLVPSVSNAVTRHGSANSSGGTLTSNSELGHGSSKSSISASIDSPSGVGNSLEFNFAAVERHVKNTGTNGRVDDSGNSPSSMIAFNQGEPLISLKLGKRAYFENACGGQDAKVSAASDVTSAASVVKKTKVSQQNAKNWYCQVEGCKVDLSSAKDYNRKHKVCVVHSKATKVVVAGLERRFCQQCSRFHGLAEFDQNKRSCRRRLMHHNARRRKPQADTISFNSSTMFYDTRQRTNLFFSQPLYGQVRSNAGSSWDNLGGLKFMETKHPPVHPTKTASPDELHFSALQITSAAAHTXHHHDLDGFMAFKGTSTKVLNQGVEAWAAASSSNNGGPEGGRALSLLSDGSWGSSSAVIQQPTSHADAGALLPPLATVAVSNAAAAAGHPLDPSPGXFWPQDDHPPLVDGPATQIPELAHLRIW

SEQ ID NO: 133 - protein, 630 aa, Zea mays
  misc_feature (232)..(232): Xaa can be any naturally occurring amino acid
  unsure (1)..(630): unsure at all Xaa locations
MASSLLSSPAKPTITTTTKTTPAPRPARSAHVHVLSAARCLRLRLRASSQHPPPPPTPRSRRPDYVPNRIDDPNYVRIFDTTLRDGEQSPGATMTSAQKLVVARQLARLGVDIIEAGFPASSPDDLDAVRSIAIEVGNPAPGPAGEEDAVHVPVICGLSRCNRKDIDAAWEAVRHARRPRIHTFIATSDIHMQHKLRKTPDQVVAIAREMVAYARSLGCTDVEFSPEDAGRXSNREFLYHILGEVIKAGATTLNIPDTVGYNLPYEFGKLIADIKANTPGIEKAIISTHCQNDLGLATANTLAGARAGARQLEVTINGIGERAGNASLEEVVMAIKCRRELLDGLYTGIDSRHITLTSKMVQEHSGLHVQPHKAIVGANAFAHESGIHQSGIDGMLKYKGTYEIISPDDIGLTRANEFGIVLGKLSGRHAVRSKLVELGYEIGDKEFEDFFKRYKEVAEKKKRVTDEDLEALLSDEIFQPKVIWSLADVQATCGTLALSTATVKLVAPDGEEKIACSVGTGPVDAAYKAVDKIIQIPTVLREYSMTSVTEGIDAIATTRVVVTGDVSNNAKHALTGQSFNRSFSGSGASMDIVVSSVRAYLSALNKICSFAGAVKASSDVPETASVPSTE

SEQ ID NO: 134 - protein, 240 aa, Zea mays
MGRGKIVIRRIDNSTSRQVTFSKRRNGIFKKAKELAILCDAEVGLVIFSSTGRLYEYSSTSMKSVIDRYGKAKEEQQVVANPNSELKFWQREAASLRQQLHNLQENYRQLTGDDLSGLNVKELQSLENQLETSLRGVRAKKDHLLIDEIHDLNRKASLFHQENTDLYNKINLIRQENDELHKKIYETEGPSGVNRESPTPFNFAVVETRDVPVQLELSTLPQQNNIEPSTAPKLGLQLIP

SEQ ID NO: 135 - protein, 439 aa, Zea mays
MGSFGMNWNQKDPMVWDWEHLVPSVSNAVTRHGSANSSGGTLTSNSELGHGSSKSSISASIDSPSGVGNSLEFNFAAVERHVKNTGTNGRVDDSGNSPSSMIAFNQGEPLISLKLGKRAYFENACGGQDAKVSAASDVTSAASVVKKTKVSQQNAKNWYCQVEGCKVDLSSAKDYNRKHKVCVVHSKATKVVVAGLERRFCQQCSRFHGLAEFDQNKRSCRRRLMHHNARRRKPQADTISFNSSTMFYDTRQRTNLFFSQPLYGQVRSNAGSSWDNLGGLKFMETKHPPVHPTKTASPDELHFSALQITSAAAHTGHHHDLDGFMAFKGTSTKVLNQGVEAWAAASSSNNGGPEGGRALSLLSDGSWGSSSAVIQQPTSHADAGALLPPLATVAVSNAAAAAGHPLDPSPGRFWPQDDHPPLVDGPATQIPELAHLRIW

SEQ ID NO: 136 - protein, 332 aa, Zea mays
MEWTAPKPASSPPLLWDWGDHAATGSGSSSDAPARRGGKEREAKRARAGEDRGGGELRCQVEGCGLDLSRVKDYHRKHRVCEAHTKSPRVIVAGQERRFCQQCSRFHALSEFDQKKRSCRRRLSDHNARRRKPQPDAFTFASAKLPSTLFDDRRQISFVWNKAPVSHVRPFTSPWDSSSDLKPPYAKEISDVSTKVGTITGQVHLDKSHMFNAIPTLSHGKDEPWPMKGLDMSISASKFDGAADLQHALSLLSAGACGLPDSVHQTSCIIQFNGASENSSDLHVTHGRNSGPASCADAQHIAAQPQSQLFHFTTDTGNTVYEPSFFGVNQIN

SEQ ID NO: 137 - protein, 628 aa, Zea mays
MASSLLSSPAKPTTATTTKTTPAPRPAHVHVLSAARCLRLRLRAVPARASSQHPPPPPTPRSRRPDYVPNRIDDPNYVRIFDTTLRDGEQSPGATMTSAQKLVVARQLARLGVDIIEAGFPASSPDDLDAVRSIAIEVGNPAPGPAGEEDAVHVPVICGLSRCNRRDIDAAWEAVRHARRPRIHTFIATSDIHMQHKLRKTPDQVVAIAREMVAYARSLGCTDVEFSPEDAGRSNREFLYHILGEVIKAGATTLNIPDTVGYNLPYEFGKLIADIKANTPGIEKAIISTHCQNDLGLATANTLAGARAGARQLEVTINGIGERAGNASLEEVVMAIKCRRELLDGLYTGIDSRHITLTSKMVQEHSGLHVQPHKAIVGANAFAHESGIHQDGMLKYKGTYEIISPDDIGLTRANEFGIVLGKLSGRHAVRSKLVELGYEIGDKEFEDFFKRYKEVAEKKKRVTDEDLEALLSDEIFQPKVIWSLADVQATCGTLALSTATVKLIAPDGEEKIACSVGTGPVDAAYKAVDKIIQIPTVLREYSMTSVTEGIDAIATTRVVVTGDVSNNAKHALTGQSFNRSFSGSGASMDIVVSSVRAYLSALNKICSFAGAVKASSDVAETASVPSTE

SEQ ID NO: 138 - protein, 368 aa, Zea mays
  misc_feature (189)..(189): Xaa can be any naturally occurring amino acid
  unsure (1)..(368): unsure at all Xaa locations
MEWTVPKRAASPPSPPLLWDWGGDHAGATGSGSGSSGDAPARRGGREREAKRARADDGEVRCQVEGCGLDLSRVKEYHRKHRVCEAHTKSPRVVVAGQERRFCQQCSRFHALSEFDQKKRSCRRRLSDHNARRRKPQPDAFAFASARLPSSSFADFPGRKRRGLLPKDKSISLFPDFSSCYLHNKFSNXDRRQISFVWNKAPVSHVRPFTSPWDSSSELPHAKEIKEVSTKVGTITGQVHLDKSYMSNAIPSLTHGKDEPWPMKGPDMSIAASKFDGAPDLQRALSLLSVGACGLPDPVHQTSCVIQFTSASENSGDLHLSHGANSGLASCGDGQHIASQPQAQLVRFTMDTSNSVYEPSFFSVNQIN

SEQ ID NO: 139 - protein, 383 aa, Zea mays
MHWAPAVVSSYPPQPLELQQQELTCLKLGKRPACCWAGAPGPGNQAAQVHGNGGAGGAAAEGKRKEKAPAAAAVPRCQVEGCHLSLADAKEYHRRHKVCEAHSKAPRVVVLGAEQRFCQQCSRFHAISEFDDAKRSCRRRLAGHNERRRKSNASEAMARGVAHPHGVTAFGHGGFLPSRGLVPAGSSPAAAGALSLLSSARGSVAGASGPWLVTAAREDIPARSSAALDDLIAENRAAALLARQYFVSDRSPAPRRDFVASSTAGCSLQQQQHPPDHDHTAGWHPHPHPYSGVGVGVGSGGGRYQYHHVAPPSAWHTTTLDLMQPTASTAAAPSTAGAALWPAVSPERAGARSSRSRSKTKDGDASGCSGLDAWAPTGGARVL

SEQ ID NO: 140 - protein, 315 aa, Zea mays
MGSFGMNWNQKDPMVWDWEHLVPSVSNAVTRHGSANSSGGTLTSNSELGHGSSKVKNTGTNGRVDDSGNSPSSMIAFNQGEPLISLKLGKRAYFENACGGQDAKVSAASDVTSAASVVKKTKVSQQNAKNWYCQVEGCKVDLSSAKDYNRKHKVCVVHSKATKVVVAGLERRFCQQCSRFHGLAEFDQNKRSCRRRLMHHNARRRKPQADTISFNSSTMFYDTRQRTNLFFSQPLYGQVRSNAGSSWDNLGGLKFMETKHPPVHPTKTASPDELHFSALQITSAAAHTGHHHDLDGFMAFKGTSTKVLNQGVEAW

SEQ ID NO: 141 - protein, 159 aa, Zea mays
MEWTAPKRAASPPSPPLLWDWGGDHAGATGSGSGSSGDAPARRGGREREAKRARADDGEVRCQVEGCGLDLSRVKEYHRKHRVCEAHTKSPRVVVAGQERRFCQQCSRFHALSEFDQKKRSCRRRLSDHNARRRKPQPDAFAFASARLPSSSFGNVFIS

SEQ ID NO: 142 - protein, 205 aa, Zea mays
MMERVEDLGLSLSLSSSLASPRTHHVATMLLRAPEKRFLEMPLLLPAKRTTEVTGEDGLRGGSDEEDGGCGIDGSRKKLRLSKDQSAVLEDSFREHPTLNPRQKAALAQQLGLRPRQVEVWFQNRRARTKLKQTEVDCEYLKRCCETLTEENRRLQKEVQELRALKLVSPHLYMHMSPPTTLTMCPSCERVSSSNGNSAAATAAA

SEQ ID NO: 143 - protein, 199 aa, Zea mays
VWLSLGCITYNVSEKRFLEMPLLLPAKRTTEVTGEDGLRGGSDEEDGGCGIDGSRKKLRLSKDQSAVLEDSFREHPTLNPRQKAALAQQLGLRPRQVEVWFQNRRARTKLKQTEVDCEYLKRCCETLTEENRRLQKEVQELRALKLVSPHLYMHMSPPTTLTMCPSCERVSSSNGNSAAATAAALEYPSRGPSLRVPSF

SEQ ID NO: 144 - protein, 641 aa, Zea mays
  misc_feature (550)..(550): Xaa can be any naturally occurring amino acid
  unsure (1)..(641): unsure at all Xaa locations
MASSLLSSPAKPTITTTTKTTPAPRPARSAHVHVLSAARCLRLRLRASSQHPPPPPTPRSRRPDYVPNRIDDPNYVRIFDTTLRDGEQSPGATMTSAQKLVVARQLARLGVDIIEAGFPASSPDDLDAVRSIAIEVGNPAPGPAGEEDAVHVPVICGLSRCNRKDIDAAWEAVRHARRPRIHTFIATSDIHMQHKLRKTPDQVVAIAREMVAYARSLGCTDVEFSPEDAGRYSAVAKSVVILAIFVQFLAAFYESEGEVIKAGATTLNIPDTVGYNLPYEFGKLIADIKANTPGIEKAIISTHCQNDLGLATANTLAGARAGARQLEVTINGIGERAGNASLEEVVMAIKCRRELLDGLYTGIDSRHITLTSKMVQEHSGLHVQPHKAIVGANAFAHESGIHQDGMLKYKGTYEIISPDDIGLTRANEFGIVLGKLSGRHAVRSKLVELGYEIGDKEFEDFFKRYKEVAEKKKRVTDEDLEALLSDEIFQPKVIWSLADVQATCGTLALSTATVKLVAPDGEEKIACSVGTGPVDAAYKAVDKIIQIPTXLREYSMTSGTEGIDAIAATRVVVTRDVSNNAKHALTGQSFYRSFSGSGASMDIVVSSVRAYLSALNKICSFAGAVKANSDVAETASVPSTE

SEQ ID NO: 145 - protein, 236 aa, Helianthus annuus
MDFHGFAEHALELRLSTTSSVAENTTNPIKKPSPSSDHCLEPSLTLALSGDSCGGSSFSIASAKREREVPSEESERGGENTSGEEDEDGGVNGKKKLRLTKAQSGLLEEAFKLHTTLNPKQKQELARDLKLRPRQVEVWFQNRRARTKLKQTEVDCEYLKRCCNTLTDENQRLRQEVQELKAQKVSPALYMQLPTTTLTVCPSCEQIGDTKSATSKNPCTKKPSFFNPFTSSSAAC

SEQ ID NO: 146 - protein, 421 aa, Myxococcus xanthus DK 1622
MRDPARTVSHSEFIHDWNGRGAAPSPAFPVEINDETLRDGMQATAVTSPTVEEKRGLLELMQHIGVSAVSLGMPAAGPWALEEVVTLARHIREEALRLEPNCAARTLHSDIVPIVEAVQRAGQPIVVHTFIGSSPLRQCAEAWDLDFILRSSTAAIDFAVRQGLEVAFITEDTTRSTPETLELLFRAAVEHGASRLVLCDTVGHATPAGTRALVRWTRDLVERLGSPVKVEWHGHNDRGLALINALVALEAGATRVHGCGLGIGERTGNAPVELLLLNLKLLGWIDQDLTRLVDYVLTLAQVCRVPIPRNYPLVGEDAFRTATGVHSAAIIKALERGDDWLADHIYSSVPAGEFGRRQQLELGPMSGMSGVRYWLMVRGLQENEQLCEEILRRAKSAASTLTEEEVWSIVQAHGGQGRSCA

SEQ ID NO: 147 - protein, 510 aa, Rubrobacter xylanophilus DSM 9941
MRRIQIFDTTLRDGEQSPGISLSVEEKVEIAHQLARLKVDVIEAGFPITSEGDFEAVSRIASEVEGPVIAGLARIHQEDIERAWEAVRWSRRPRIHTFVGTSDLHIEHQMRSTREEILSGAAEAVRLAKSLCENVEFSPMDATRTDIGYLAEVVAAAVEAGADVINIADTVGYTTPAEFAAFLRELKERVPGLAERVLSVHCHDDLGMAVANSLAGVEAGATQVEVAVNGIGERAGNASLEEVVMALVTRKDYYGVEVGVETRQLANTSRMVSNMTGYDVPPNKAVVGRNAFLHESGIHQDGVLKDRRTFEIMKPADIGLEGTNIFLGKHSGRHALKEALADLGYTLEGETLKRAFKRFKELADHKKTVTAADLEAIAADEVGSFEGKFVLESFRVVAATGRQSRAAVRIAHADRGTFEAEAEGEGPVDAVFRAIDSATGIKGRLTDFRIDAVTGGKDALGEVRVTVEFEGTECAGRGLSQDVVEAAARAYVRAVNVYTAGAVKVPQATP

SEQ ID NO: 148 - protein, 520 aa, Rubrobacter xylanophilus DSM 9941
MSIKLFDTTLRDGAQREGVSLTAEDKARIARELDSLGLHYIEAGFPASNPKDLEFFEGFDASELENARLVAFTRARRPGGRAGDDPAVSLLARLSAPVACIVAKSWRLHVEKVLGTTPEKNLESVRDTVAYLAAAGKEVIFDAEHYFDGFREDPEHALAVLRAAAEAGATTLVLCDTNGGTLPTELKAVVARTVREFPGVEIGIHTHNDAGCGVANALAAVEAGATHVQGTINGVGERCGNCDLVTTIANLQLKMGLKVVEEEQLRRLTEVSNYVSEIMNITPDAHRPYVGRSAFAHKGGLHVDGISRDPRTYEHVAPELVGNQRRTPVGELSGKNSVRAKAAELGLEVEDVSTVLSAIKRKEHEGYHYEAADASLALLIQRTTGEDEPLFELESLRVISEKRAGGEATVEATIKLYIKGQRVISTAEGNGPVNALDRALRQAIEPHYPELKEIHLSNYKVRILDEHRATAATTRVLIDSTDGKRVWGAVGVGENIIEASWQALVDGLEYGINGAKKQKG

SEQ ID NO: 149 - protein, 589 aa, Oryza sativa Japonica Group
MASSLLSSPKPSSFSSANPTSTPRPRAQTLSPFRAAAPRFSHGLATAAAAANPSASRRCYHRAFARPVRASMAQPRRPEYVPNRIDDPNYVRIFDTTLRDGEQSPGATMTSAEKLVVARQLARLGVDIIEAGFPASSPDDLDAVRSIAIEVGNTPVGEDGHVPVICGLSRCNKRDIDAAWEAVRHARRPRIHTFIATSEIHMQHKLRKTPEQVVAIAKEMVAYARSLGCPDVEFSPEDAGRSNREFLYHILEEVIKAGATTLNIPDTVGYTLPYEFGKLIADIKANTPGIENAIISTHCQNDLGLATANTLAGAHAGARQLEVTINGIGERAGNASLEEVVMAIKCRRELLGGLYTGINTQHITMSSKMVQEHSGLHVQPHKAIVGANAFAHESGIHQDGMLKYKGTYEIISPDDIGLTRANEFGIVLGKLSGRHAVRSKLVELGYEITDKEFEDFFKRYKEVAEKKKRVTDEDIEALLSDEIFQPKVFWSLADVQATCGTLGLSTATVKLIGPDGDEKIACAVGTGPVDAAYKAVDDIIQIPTVLREYSMTSVTEGIDAIATTRVVVTGDVSDSKHALTGHSFNRAFR

SEQ ID NO: 150 - protein, 244 aa, Eucalyptus globulus
MGRGRLQLKRIENKINRQITFSKRRAGLLKKAHEISVLCDAEVALIVFSAKGKLFEYSTDSCMERILERYERYSYAEHQVLASETESIGSWTLEHAKLKARLEVLHRNYRHFMGEDLDSLSLKDLQNLEQQLESALKHIRSRKNQLMHESISVLQKKDRALQEQNNLLTKKIKEKERALAQQAQWEQQDHALDSPVVLPHYLPSLDINGSYQARHNGHDDGENLTQPRAGTLLPPWISASQLRL

SEQ ID NO: 151 - protein, 518 aa, Buchnera aphidicola (Schizaphis graminum)
MNSQVIIFDTTLRDGEQALQASLSVKQKLQIALSLENAGIDIIEVGFPISSPGDFKSVQTISKNIKNSRICSLARCLNKDIDTAAEAMSSSNTFRIHIFLATSTLHMESKLKKNFDQIIDMAISSVKRALRYTDDVEFSCEDASRTTMDNLCRIVEQLIKAGVKTINIPDTVGYTVPNELSTIIHNLFKRVPNIDQSIISVHCHNDLGMAVGNSISAIQAGARQIEGTINGIGERAGNTALEEVIMAIKVREDILGVSTNIKHKEIYRTSQIISQICNLPIPPNKAIVGSNAFAHSSGIHQDGVLKNRKNYEIMEPSSIGLKEVKLNLTSRSGRAAVKYYMTQMGYKECDYNIDELYTSFLKLADKKGQVFDYDLEALAFINMQQEESEYFSLSFFSVQSISNGLSTASVKLLCGKKVSIESATTSNGPIDAIYQALNRITNFPITLQKYQLVAKGKGRDALGQVDILVEYKKRKFHGVGLATDIIESSAQAMVNVLNNIWKANQVNEKLKTLKKVNN

SEQ ID NO: 152 - protein, 516 aa, Buchnera aphidicola
MSSKVIIFDTTLRDGEQALQASLSVKEKLQIALSLEKCGIDIIEVGFPISSPGDFKSVQTISKKIKNSRICSLARCVEKDIEVAGDAMSSSDFFRIHIFLATSTLHMESKLRKNFDEIIDMAVSSVKKALRYTDDVEFSCEDASRTTMDNLCRIVEKLIKAGVKTINIPDTVGYTIPNELSNIIKNLFERVPNIHKSIISVHCHNDLGMAVGNSISAIQAGARQIEGTINGIGERAGNTALEEIIMAIKVREDILGVSTNIVHKEIYRTSQIISQICNMPIPANKAIVGSNAFAHSSGIHQDGVLKNRKNYEIMEPNTIGVKEVKLNLTSRSGRAAVKYYMDKMGYKDDDYDIDELYSAFLKLADKKGQVFDYDLEALAIFSKKQENAEYFYLKFFSVQSISNGLSTASVKLKCGKKVYTESSTTSNGPVDATYQALNKIINFPITLQKFQLVAKGKGKDALGQVDILVKYENRQFHGIGLATDIIESSAQAMINVLNNIWKSQQVNKKLKNLKKY

SEQ ID NO: 153 - protein, 519 aa, Buchnera aphidicola str. APS (Acyrthosiphon pisum)
MKSKVVIFDTTLRDGEQALQASLSVKEKLQIALSLEKCGIDILEIGFPVSSPGDFKSVQTISKNIKNSRICSLARCIEKDIDAAGEAMSSSDSFRIHIFLATSTLHMESKLKKNFNEIIDMAVFSVKKALRYTDDIEFSCEDATRTTMDNLCRIVETLIKSGVKTINIPDTVGYTVPNELSCIIKNLFERVPNIHKSIISVHCHDDLGMAVGNSISAIQAGARQIEGTINGIGERAGNTALEEIIMAIKVREDILSVSTNINYKEIYRTSKIVSQICNMPIPSNKAIVGSNAFAHSSGIHQDGVLKNRKNYEIMEPSSIGLKEVKLNLTSRSGRAAVKHYMDEMGYNNSDYNIDELYTAFLKLADKKGQVFDYDLEALAFINKQQDEWEYFSLKFFSVQSISNSLSTASVKLLCGKKTYTESSTTSNGPVDAIYQALNRIACFPIILQKFQLVAKGKGKDALGQVDILVEHKKRKFHGVGLATDIIEASAQAMINVLNNIWKAKQVNKKLKILKDFKKK

SEQ ID NO: 154 - protein, 386 aa, Cytophaga hutchinsonii ATCC 33406
MGKRIFVFDTTLRDGEQVPGCQLNTEEKIIVAKALDELGVDVIEAGFPVSSPGDFNSVVEITKAVTRPTICALTRAKEADINIAGEALRFAKRSRIHTGIGSSDIHIEHKLRSTRENILEMAVAAVKQAKKVVHEVEFFCEDAGRADQAFLARMVEAVIEAGADVVNIPDTTGYMLPWQYGERIKYLMDNVSNIDKAILSAHCHNDLGLATANSLAALQNGARQVECTINGIGERAGNTALEEVVMAMECHKETLGLETGINHKKLVPISHLVSTLMRMQVQSNKAIVGRNAFAHSSGIHQDGFLKHRETYEIIDPAAVGADSSSIILTARSGRAALNHRLATIGYMLSKDQLDQAYTQFLDMADHLRKVEDENLHELMRGKVYAK

SEQ ID NO: 155 - protein, 486 aa, Buchnera aphidicola
  misc_feature (153)..(172): Xaa can be any naturally occurring amino acid
  unsure (1)..(486): unsure at all Xaa locations
QIALCLEKAGVDIMEVGFPISSPGDFKSVQIISQHIKNSRICSLARCIEKDIDAAGEAMSVSDAFRIHIFLATSTLHMESKLRKNFDEIIDMAIFSVKRALRYTDDIEFSCEDASRTTIDNLCRIVEKLISFGVKTINIPDTVGYTVPNELSXXXXXXXXXXXXXXXXXXXXHCHDDLGMAVGNSISAIQAGARQIEGTINGIGERAGNTALEEVIMAIKVREDILGLSTNINYKEIYRTSQIVSRICNMPIPSNKAIVGSNAFSHSSGIHQDGVLKNRENYEIMDPSSIGLKRVKLNLTSRSGRAAVKYYMSEMGYKEDDYNIDELYTDFLKLADKKGQVFDYDLEALAFINKQQDESEYFSLKFFSVQSISNNLSTASVTLLCGKKIYTEASTTSNGPVDAIYQALNRITHFPIILQKFQLIAKGKGRDALGQVDILVEYKKRKFHGVGLATDIMESSAKAMVNVLNNIWKAKQVNKNLKNLKK

SEQ ID NO: 156 - protein, 502 aa, Buchnera aphidicola
DGEQSLQASLSVKEKLQIALCLEKAGVDIIEVGFPISSPGDFKSVQTISQKIKNSKICSLARCIEKDIDTAAEAMSVCNSFRIHIFLATSTLHIESKLRKNFNEIIEMAIFSVKRALRYTDDIEFSCEDASRTTMDNLCRIVEKLIYCGVKTINIPDTVGYTVPNELSGVIKNLFERVPNIHKSIISVHCHNDLGMAVGNSISAIQAGARQIEGTINGIGERAGNTALEEVIMAIKVREDILGVSTNINHKEIYQTSQIISRICNIPVPSNKAIVGSNAFSHSSGIHQDGVLKNRENYEIMDPNSIGLKKVKLNLTSRSGRAAVKYYMNYMGYKDSDYNIDELYFNFLKLADKKGQVFDYDLEALAFMNKKHDESEYFSLQFFSVQSISNNLSTASVKLLCGKKTYTESSTTSNGPVEAIYQALNKITQFPIVLQTFQLIAKGKGKDALGEVKILVEYKKRQFHGLGLAANIIESAAQAMINVLNNIWQAKQVNKKLKNLKK

SEQ ID NO: 157 - protein, 491 aa, Buchnera aphidicola
VKEKLQIALSLEKAGVDIMEVGFPISSPGDFKSVQTISKNIKNSRICSLARCLEKDIDAAGEAMSVCDSFRIHIFLATSTLHMESKLRKNFNEIVDMAVFSVKKALRYTDDVEFSCEDASRTTIDNLCRIVEKLIKSGVKTINIPDTVGYSIPNELTCIIQNLFERVPNIHKSIISVHCHDDLGMAVGNSISAIQAGARQIEGTINGIGERAGNTALEEVIMAIKVRKDILGVSTNINHKEIYRTSQIISRICNMPIPSNKAIVGSNAFSHSSGIHQDGVLKNRENYEIMDPKSIGLKKVKLNLTSRSGRAAVRYYMNEMGYKDSDYNIDELYADFLKLADKKGQVFDYDLESLAFINKQQDELEYFRLQFFSVQSISNNLSTASVKLLCGKKIYTESSTTSNGPVDAVYQALNRITHFPIILQKFQLMAKGKGKDALGQVDILVEYKKRKFHGVGLATDIIESSAQAMVNVLNNIWKAKQVNKNLKNLKK

SEQ ID NO: 158 - protein, 502 aa, Buchnera aphidicola
DGEQALQASLSVKEKLQIALCLEKAKVDIMEVGFPISSPGDFKSVQTISKNIKNSRICSLARCIEKDIDAAGEAMSVCDSFRIHLFLATSILHMESKLRKNFNEIIDMAVFSVKKALRYTDDIEFSCEDASRSTIDNLCRIVEVLINTGVKTINIPDTVGYAVPNEFSFIIKSLFERVPNIHKSVISVHCHDDLGMAVGNSISAIQAGARQIEGTINGIGERAGNTALEEIIMAIKVRENLLGVSTNINHKEIYRTSQIVSRICNMPIPSNKSIVGSNAFSHSSGIHQDGVLKNRENYEIMDPISIGVKKVKLNLTSRSGRAAVKYYMNQMGYKDSDYNIDELYVDFLKLADKKGQVFDYDLESLAFINKQQDELEHFYLKFFSVQSISNSLSTASVKLLCGKDLHTESSTTSNGPVDAIYQALNKITHFPIVLQKFQLIAKGKGKDALGQVDIIVEYKKRKFHGVGLATDIIESSAKAMINVLNNIWKAKQVNEKLKNLKQ

SEQ ID NO: 159 - protein, 502 aa, Buchnera aphidicola
DGEQALQASLSVKEKLQIALCLEKAGVDIMEVGFPISSPGDFKSVQTISQNIKNSRICSLARCIEKDIDAAGEAMSISNSFRIHIFLATSTLHMESKLRKNFNEIIDMAIFAVKRALRYTDDIEFSCEDASRTTIDNLCRIVEKLISSGVKTINIPDTVGYTIPNELSNIIKSLFERVPNIHKSIISVHCHNDLGMAVGNSISAIQAGARQIEGTINGIGERAGNTALEEIIMAIKVREDILGLSTNINHKEIYRTSQIVSRICNVPIPSNKAIVGSNAFSHSSGIHQDGVLKNRENYEIMDPSSIGLKKVRLNLTSRSGRAAVKYYMKEMGYKENDYNIDELYTDFLKLADKKGQVFDYDLEALAFINKQQDESEYFSLKFFSVQSISNNLSTASVTLLCGKKIYTEASTTSNGPVDAIYQALNRITHFPIILQKFQLIAKGKGKDALGQVDILVEYKKRKFHGVGLATDIMESSAKAMVNVLNNIWKAKQVNKNLKNLKK

SEQ ID NO: 160 - protein, 506 aa, Buchnera aphidicola
DGEQALQASLSVKEKLQIALSLEKCGIDILEIGFPVSSPGDFKSVQTISKNIKNSRICSLARCIEKDIDAAGEAMSSSDSFRIHIFLATSTLHMESKLKKNFNEIIDMAVFSVKKALRYTDDIEFSCEDATRTTMDNLCRIVETLIKSGVKTINIPDTVGYTVPNELSCIIKNLFERVPNIHKSIISVHCHDDLGMAVGNSISAIQAGARQIEGTINGIGERAGNTALEEIIMAIKVREDILSVSTNINYKEIYRTSKIVSQICNMPIPSNKAIVGSNAFAHSSGIHQDGVLKNRKNYEIMEPSSIGLKEVKLNLTSRSGRAAVKHYMDEMGYNNSDYNIDELYIAFLKLADKKGQVFDYDLEALAFINKQQDEWEYFSLKFFSVQSISNSLSTASVKLLCGKKTYTESSTTSNGPVDAIYQALNRIACFPIILQKFQLVAKGKGKDALGQVDILVEHKKRKFHGVGLATDIIEASAQAMINVLNNIWKAKQVNKKLKILKDFKKK

SEQ ID NO: 161 - protein, 502 aa, Buchnera aphidicola
DGEQALQASLSVKEKLQIALCLEKSGVDIMEVGFPISSPGDFKSVQTISQKIKHSRVCSLARCIEKDIDVAGEAMSASDSFRIHIFLATSTLHMESKLKKNFNEIIDMAIFSVKRALRYTDDVEFSCEDASRTTIDNLCRIVEKLISCGVKTINIPDTVGYTIPNELSFIIKNLFERVPNIHKSTISVHCHNDLGMAVGNSISAIQAGARQIEGTINGIGERAGNTALEEVIMAIKVREDILGLSTNINHKEIYRTSQIVSSICNMPIPSNKAIVGSNAFSHSSGIHQDGVLKNRENYEIIDPISIGLKKVKLNLTSRSGRAAVKYYMNEMGYKENDYNIDELYTDFLKLADKKGQVFDYDLEALAFINKQQDESEYFSLKFFSVQSISNNLSTASVTLLCGKKIYTEASTTSNGPVDAIYQALNRITHFPIVLQKFQLIAKGKGKDALGQVDILVEYKKRKFHGVGLATDIMESSAKAMVNVLNNIWIAKQVNKNLKNLKK

SEQ ID NO: 162 - protein, 110 aa, Zinnia violacea
KIWFQNRRARTKLKQTEVDCEFLKRCCENLTEENRRLQKELQELKALKLSPQFYMQMAPPTTLTMCPSCERVGAPPSQKSIDHQHRKLPFYPWPTSASQVVQRQMGALHH

SEQ ID NO: 163 - protein, 517 aa, Haemophilus somnus 129PT
MQNNIIIFDTTLRDGEQALKASLTVKEKLQIALALERLGVDVMEVGFPVSSAGDFESVQTIARHIKNSRVCALSRAMDKDIDIAADALKVAEAFRIHTFIATSALHVEAKLRRTFDDVVEMAIQAVKRARRYTDDVEFSCEDAGRTGVDNICRIVEAAIKAGATTVNIPDTVGFCLPTEYGNIINQVMNRVPNIDKAVISVHCHNDLGMATANSLTAVQNGARQIECTINGIGERAGNTALEEVVMAIKTRQDIFKGLDTRINTQEIHRVSQMVSQLCNMPIQPNKAIVGSNAFAHSSGIHQDGMVKNKNTYEIMSPETIGLKKEKLNLTARSGRAAVKSHMDAMGYQQNDYDLDKLYAAFLKLADKKGQVFDYDLEALAFIDMQQGDEDRLSLDVITSQTISNLPASAFVQVELDGKKISQVSNGGNGPVDAVYNAILAITDMDITMLHYNLTAKGEGAEALGQVDIVVEHKGRRFHGVGLATDIVESSARALIHAINAIYRANKVADLKSHKISQ

SEQ ID NO: 164 - protein, 541 aa, Trichodesmium erythraeum IMS101
MITSQDRVIIFDTTLRDGEQSPGATLNIDEKLTIARQLSLLGVDVIEAGFPYASIGDFEAVQKIAEIVGVEGGPTICGLARTTRADIEAAGKALKPAAKARIHTFIATSDIHLAYKLKKTRAEVLEIASEMVAYAKTFVDDVEFSPEDAGRSDPEFLYQVLEKAIAAGATTVNIPDTVGYTTPAEFGGLIRGIKENVPNIDQAIISVHGHNDLGLAVANFLEAVKNGARQLECTINGIGERAGNAALEELVMAFHVRRQYFNPFFGRPPESETPLTNINTRHIYKTSRLVSSLTGMFVQPNKAIVGANAFAHESGIHQDGVLKNKLTYEIMDAQSIGLTDNQIVLGKLSGRHAFQSRLQELGFKLSDEEINKAFIKFKDLADKKKEITDWDLESIVNAEIQQPPELFRLELVQVSCGDRSRPTATVIIRTPNGEELTDAAIGTGPVDAVYKAINRVVNVENDLVEFSVQSVTAGIDAIGEVTIRVRHEGRVYSGHAANTDIIVASAEAYLSALNRLYAVLQRGVEKINLPKDQPTEVVAGS

SEQ ID NO: 165 - protein, 540 aa, Synechococcus sp. CC9311
MAKDPGRVLIFDTTLRDGEQSPGASLNLEEKLAIAQQLARLGVDVIEAGFPFASPGDFAAVQRIAQQVGGENGPIICGLARASRGDIKACADAVAPAPKQRIHTFIATSDIHLEHKLRKSRKDVLGIVPEMVAYARSFVDDVEFSCEDAGRSDPEFLYEVIEAAISAGASTVNIPDTVGYTTPTEFGRLIEGINRNVPNIDEAVISVHGHNDLGLAVANFLEAVKSGARQLECTVNGIGERAGNAALEELVMAMHVRRRYFNPFFGRDEDSPTPLTAVRTEEITKTSRLVSNLTGMVVQPNKAIVGANAFAHESGIHQDGVLKNRLTYEIVDARTVGLTDNRISLGKLSGRSAVRARLEELGYDLSREDLDDAFARFKDLADRKREITDRDLESIVSVQVQQPDAKYQLKLVQVSCGSSLQPTATVTLADENGQEQTAASVGTGPVDAVCRSLNQLAGEPNELVEFSVKSVTEGIDAMGDVTIRLRRDGQLYSGHSAHTDVVVAAAEAFVNALNRLVAGTAGPTIHPQLDMAQLDSSPVH

SEQ ID NO: 166 - protein, 522 aa, Shewanella sp. MR-4
MSNRVIIFDTTLRDGEQALAASLSVKEKLQIAMALERLGVDVMEVGFPVSSPGDFESVQTIARTIKNSRVCALSRALEKDIDAAAQALSVAEQFRIHTFISTSTIHVESKLKRSFEQVLEMAVGAVKYARRFTDDVEFSCEDAGRTPIDNLCRMVEAAIHAGARTINIPDTVGYTVPSEFGGIIQTLFNRVPNIDQAIISVHCHDDLGMSVANSITAVQHGARQIECTMNGIGERAGNCSLEEIAMILATRKNLLGVETGINAKEIHRTSNLVSQLCNMPIQSNKAIVGANAFTHSSGIHQDGMLKAQNTYEIMTPESIGLNRNNLNMTSRSGRHVIKHRMEEMGYSEQDYNLDALYEQFLHLADKKGQVFDYDLEALAFMEAQAAEDNFYQLQQLVVQSDSTEGVATATVRIDVGGEIKTEAATGNGPVDAAYNAIARATDRRIDIISYKLGAKGEGQNALGQVDITAVYHEQNFHGVGLATDVVEASARALVHVMNLTCRADKVADYKQNMHKNRELGGV

SEQ ID NO: 167 - protein, 522 aa, Shewanella sp. MR-7
MSNRVIIFDTTLRDGEQALAASLSVKEKLQIAMALERLGVDVMEVGFPVSSPGDFESVQTIARTIKNSRVCALSRALEKDIDAAAQALSVAEQFRIHTFISTSTIHVESKLKRSFEQVLEMAVGAVKYARRFTDDVEFSCEDAGRTPIDNLCRMVEAAIHAGARTINIPDTVGYTVPSEFGGIIQTLFNRVPNIDQAIISVHCHDDLGMSVANSITAVQHGARQIECTMNGIGERAGNCSLEEIAMILATRKNLLGVETGINAKEIHRTSNLVSQLCNMPIQSNKAIVGANAFTHSSGIHQDGMLKAQNTYEIMTPESIGLNRNNLNMTSRSGRHVIKHRMEEMGYSEQNYNLDALYEQFLHLADKKGQVFDYDLEALAFMEAQAAEDNFYQLQQLVVQSDSTEGVATATVRIDVGGEIKTEAATGNGPVDAAYNAIARATDRRIDIISYKLSAKGEGQNALGQVDITAVYHEQNFHGVGLATDVVEASARALVHVMNLTCRADKVADYKQNMHKNRELGGV

SEQ ID NO: 168 - protein, 517 aa, Alkalilimnicola ehrlichei MLHE-1
MSEKERLIIFDTTLRDGEQSPGASMTREEKVRIGRALERLKVDVIEAGFPAASEGDFESVRAVARAVRGSRICGLARAREDDIRRAGEALQEAEAGRIHTFLATSPIHMEKKLRMTPDEVVDAAVRAVKLARSLCDDVEFSPEDAGRSDPEFLCRVIEAVIDAGAGTVNIPDTVGYNLPEQFGGLIGRLRERVPNSDKAVFSVHCHNDLGVAVANSLAAVMNGARQVECTINGLGERAGNAALEEVVMAVRTRQDFFPCDTGIDAHEIVPASRLVANITGFQPQPNKAIVGANAFAHESGIHQDGVLKHRETYEIMRAEDVGWHTNRMVLGKHSGRNAFRARLKDLGIEFESEEQLNEAFQRFKGLADKKHEIFDEDLQALVTEANLELENERYRLLALRVCSETGETPEAIVTLAVDGHERRAVCPGSGPVDAAFKAIEELVGAADTELLLYSVSNITTGTDSQGEVTVRLERGGRIVNGQGSDTDIVIASAKAYLNALNKIDQGELRRHPQAADV

SEQ ID NO: 169 - protein, 519 aa, Hyphomonas neptunium ATCC 15444
MTSKNTAANDATKPRILIFDTTMRDGEQSPGASMTLNEKLELATLLESMGVDIIEAGFPAASEGDFAAVSAIAAQSKSAVICGLSRSTPNDIDRCGEAVRKAARPRIHTFISTSPVHMKHKLKMGPNAVLEAVGRSVSQARNLVDDVEWSAEDATRTEFDFLCKCIDTAIASGATTINVPDTVGYSHPDEYGALIRRLIENIPNSDKVIWSAHCHNDLGLAVANSLAGMANGVRQIECTINGLGERAGNAALEEIVMAMKVRGDTLPYETHIDTSYLARASAMVSRITGFPVQYNKAIVGKNAFAHESGIHQDGMLKNSETYEIMKPEDVGVAKTSLVMGKLSGRNAFRDKLESMGYFIEGDALNDAFKRFKDLADRKKHVFDDDIIALVDEQLAAEGERIAFKRLRVVAGTEGPQTAEIDLVIDGEEKYSIARGNGPVDAVFNAIRQLVPHQAILELYQVHAVTGGTDAQATVSVRLNGDDIMATGRSSDPDTLVASAKAYLHALNKFEVRKAKRKAA

SEQ ID NO: 170 - protein, 302 aa, Pimpinella brachycarpa
MMIHQREDHLGLSLSLSSPAHRPSSSSSPLQLNLAPSMPTPSTPPFNLFHKKETSDGYILDACRVETRSFLKGIDVNRLPATTVDMEEEAGVSSPNSTISSVSGKRSLERSENGNGDDLLDCSRGLINSDEEDGDNSRKKLRLSKDQSAILEDSFKEHNTLNPKQKLALAKRLGLRPRQVEVWFQNRRARTKLKQTEVDCEFLKRCCENLTDENRRLMKEVQELRALKLSPQFYMQMTPPTTLTMCPSCERVSAPPSSSTGPSSTPVETPRPHHSGSSHHRVAFNPWAIAPAGHRSFDAVPH

SEQ ID NO: 171 - protein, 503 aa, Archaeoglobus fulgidus DSM 4304
MSAVMTTIRVFDTTLRDGEQMPGVSLPLEYKIRIAKQLDKLGVDVIEAGFPSATKGEFESVKEISSLSLNAEICGLARIVKEDIDAAINANVDMVHIFVPTSRIQIEHTVKMSKEEIIEKSVECVEYIKSHGVKCMFSAMDATRTEVEYLKQIFKAVENAKVDIVNVPDTVGVATPFKFYELIKQLREHLKVPIDVHCHNDFGLAVANTYAAVMAGANEVQVTVNGIGERAGNADLAQVVMILHAIEGIKTNIKTEHLFETSKLVERLTGVKMPPNHPIVGENAFSHESGIHAHGVLKEYSTFEPGVVTPEMVGHKRRIVIGKHAGRYQIKKILEEAGYHLDDEKLNQIFEKVKEMGDKGKRVTDLDLFAIAEVVIGELKREEKAILVDEVTVLTGNKITPTAVLNAEVFGHRKVTSAIGVGPVDASLKAVTSLVGESIRITEFRMDAITGGSDALAEVYVTVEDDEGHSFTSRGAAQDIVMASIDAVINAVNYLLRMKRRKS

SEQ ID NO: 172 - protein, 489 aa, Archaeoglobus fulgidus DSM 4304
MQVKILDTTLRDGEQTPGVSLSVEQKVMIAEALDNLGVDIIEAGTAIASEGDFQAIKEISQRGLNAEICSFARIKREDIDAAADAGAESIFMVAPSSDIHINAKFPGKDRDYVIEKSVEAIEYAKERGLIVEFGAEDASRADLDFVIQLFKRAEEAKADRITFADTVGVLSPEKMEEIVRKIKAKVKLPLAIHCHDDFGLATANTIFGIKAGAEEFHGTINGLGERAGNAAIEEVVIALEYLYGIKTKIKKERLYNTSKLVEKLSRVVVPPNKPIVGDNAFTHESGIHTSALFRDAKSYEPISPEVVGRKRVIVLGKHAGRASVEAIMNELGYKATPEQMKEILARIKEIGDKGKRVTDADVRTIIETVLQIKREKKVKLEDLAIFSGKNVMPMASVKLKIDGQERIEAAVGLGPVDAAINAIRRAIKEFADIKLVSYHVDAITGGTDALVDVVVQLKKDNKIVTARGARTDIIMASVEAFIEGINMLF

SEQ ID NO: 173 - protein, 217 aa, Arabidopsis thaliana
RRNGLLKKAKELAILCDAEVGVIIFSSTGRLYDFSSSSMKSVIERYSDAKGETSSENDPASEIQFWQKEAAILKRQLHNLQENHRQMMGEELSGLSVEALQNLENQLELSLRGVRMKKDQMLIEEIQVLNREGNLVHQENLDLHKKVNLMHQQNMELHEKVSEVEGVKIANKNSLLTNGLDMRDTSNEHVHLQLSQPQHDHETHSKAIQLNYFSFIA

SEQ ID NO: 174 - protein, 416 aa, Oryza sativa Japonica Group
MMNVPSAAAASSCDDFGYNATPPPPPSLLPIMDQDGGGGSIQRDHHQHHNHQQLGYNLEPSSLALLPPSNAAAAAAHHATIAHASPHDLLQFYPTSHYLAAAGGAGGGGNPYSHFTAAAAAGSTFQSYYQQPPQDAPEYYFPTLVSSAEENMASFAATQLGLNLGYRTYFPPRGGYTYGHHPPRCQAEGCKADLSSAKRYHRRHKVCEHHSKAPVVVTAGGLHQRFCQQCSRFHLLDEFDDAKKSCRKRLADHNRRRRKSKPSDGEHSGEKRRAQANKSAATKDKAGSSSKNAGIGDGFETQLLGGAHMSKDQDQAMDLGEVVKEAVDPKGKASMQQQQQQAHHGIHQQSHQQHGFPFPSSSGSCLFPQSQGAVSSTDTSNIAQVQEPSLAFHQQHHQHSNILQLGQAMFDLDFDH

SEQ ID NO: 175 - protein, 343 aa, Oryza sativa Japonica Group
MECNPVSSTTSSSLLWDWDATASAEPPPPPGKRGGRDSSSASASAKRGRSAAAAGDAAAVAAEAPRCQVEGCGLELGGYKEYYRKHRVCEPHTKCLRVVVAGQDRRFCQQCSRFHAPSEFDQEKRSCRRRLSDHNARRRKPQTDVFAFGSGTLPRSLFDDRQQISFAWDNNAPLNHANTTSSSSWTSDLQLSQVMDISKRSRKAGADSANIRLSNALPTLCHDTNELLPIKGADASETASKLDGALDVQRALSLLSASSRGLTDPGHQTSSIIQFTNSNQNSTLPSVPSEGNSNVPFWVDGQHQAVEPQVFQFTMDTGNTVFPDLERIKPSYESSMFGLNQIH

SEQ ID NO: 176 - protein, 639 aa, Oryza sativa Japonica Group
MASSLLSSPKPSSFSSANPTSTPRPRAQTLSPFRAAAPRFSHGLATAAAAANPSASRRCYHRAFARPVRASMAQPRRPEYVPNRIDDPNYVRIFDTTLRDGEQSPGATMTSAEKLVVARQLARLGVDIIEAGFPASSPDDLDAVRSIAIEVGNTPVGEDGHVPVICGLSRCNKRDIDAAWEAVRHARRPRIHTFIATSEIHMQHKLRKTPEQVVAIAKEMVAYARSLGCPDVEFSPEDAGRSNREFLYHILEEVIKAGATTLNIPDTVGYTLPYEFGKLIADIKANTPGIENAIISTHCQNDLGLATANTLAGAHAGARQLEVTINGIGERAGNASLEEVVMAIKCRRELLGGLYTGINTQHITMSSKMVQEHSGLHVQPHKAIVGANAFAHESGIHQDGMLKYKGTYEIISPDDIGLTRANEFGIVLGKLRLNLAHLTLRKPLPGLLGYEITDKEFEDFFKRYKEVAEKKKRVTDEDIEALLSDEIFQPKVFWSLADVQATCGTLGLSTATVKLIGPDGEEKIACAVGTGPVDAAYKAVDDIIQIPTVLREYSMTSVTEGIDAIATTRVVVTGDVSDSKHALTGHSFSRAFSGSGAALDIVVSSVRAYLSALNKMSSFVGAIKASSEVSESQRVQTTE

SEQ ID NO: 177 - protein, 635 aa, Oryza sativa Japonica Group
MASSLLSSPKPSSFSSANPTSTPRPRAQTLSPFRAAAPRFSHGLATAAAAANPSASRRCYHRAFARPVRASMAQPRRPEYVPNRIDDPNYVRIFDTTLRDGEQSPGATMTSAEKLVVARQLARLGVDIIEAGFPASSPDDLDAVRSIAIEVGNTPVGEDGHVPVICGLSRCNKRDIDAAWEAVRHARRPRIHTFIATSEIHMQHKLRKTPEQVVAIAKEMVAYARSLGCPDVEFSPEDAGRSNREFLYHILEEVIKAGATTLNIPDTVGYTLPYEFGKLIADIKANTPGIENAIISTHCQNDLGLATANTLAGAHAGARQLEVTINGIGERAGNASLEEVVMAIKCRRELLGGLYTGINTQHITMSSKMVQEHSGLHVQPHKAIVGANAFAHESGIHQDGMLKYKGTYEIISPDDIGLTRANEFGIVLGKLSGRHAVRSKLVELGYEITDKEFEDFFKRYKEVAEKKKRVTDEDIEALLSDEIFQPKVFWSLADVQATCGTLGLSTATVKLIGPDGDEKIACAVGTGPVDAAYKAVDDIIQIPTVLREYSMTSVTEGIDAIATTRVVVTGDVSDSKHALTGHSFNRAFSGSGAALDIVVSSVRAYLSALNKMSSFVGAIKASSEVSESQRVQTTE

SEQ ID NO: 178 - protein, 586 aa, Ostreococcus tauri
MRCERFVAVASVGSESAVTRAPRPAYVPGVISDPKYVRVFDTTLRDGEQSPGATLTSREKLDIATSLAKLGVDVIEAGFPIASPDDLEAVRGIAKKVGNEVYEDGYVPVICGLSRANKKDIDAAWEGVRHALRPRIHTFIATSQIHMDYKLRKTPDEVVQIAVDAVKYARSLGCEDVEFSPEDAGRSDPQFLYRILNAVVEAGATTLNIPDTVGICLPDEFGTLIKGIKENVKGAGETVVISTHCQNDLGLSTANSLAGVANGARQVECTINGIGERAGNASLEEVTMAIFMRGQERLMGAYTGINPVYIYPSSQMVKNFSGMAIQPHKAIVGANAFAHESGIHQDGMLKNKLTYEIIAPEQIGYFRGEDECGVVMGKHSGRHALSSKLKQLGVPMEGAALDEVFNRFKLVAETKLGGVNDDELLAIVRDGESVQDPAWSLETVQVVCGTTGLPTATVRMNNRDGTQHISAVVGTGPVDAAFKAIDALVGLDVVLTEYRVTAVTKGINSMAETTITIKPKEGVEQKLGTDVYKTNVQTGEKTMRAFTATGADTDIVVSSARAYVIALNRMVEYVAKAYVHAEPVSR

SEQ ID NO: 179 - protein, 319 aa, Pimpinella brachycarpa
MMVQERDELGLSLSLSFPGSSHEQNKSNTTNNKHNQMPHASTPLELNLMPSQPLNLLHNNTTTTWTHPASHDRKMEACRVDRRSLLTGIDVNRIPAMTVDMEEETGVSSPNSTISSLSGNKRSLVNERSELANGDEILECSRSDDEDGDNSRKKLRLTKDQSAILEESFKEHNTLNPKQKIALAKRLGLRPRQVEVWFQNRRARTKLKQTEVDCEFLKRCCQTLTEENRKLQKEVQELRALKSSPQFYMQMTPPTTLTMCPSCERVGGLQSATTTSSAGPSITQAEPLRSHPMNSNHHRLPFNPWASPQRPLDALHPRS

SEQ ID NO: 180 - protein, 540 aa, Synechococcus sp. RS9916
MAKDPGRVLIFDTTLRDGEQSPGASLNLEEKLAIAQQLARLGVDVIEAGFPFASPGDFSAVQRIAQQVGGENGPIICGLARASRADIKACADAVAPAPRRRIHTFIATSDIHLEHKLRKSRKEVLAIVPEMVAYARSLVDDVEFSCEDAGRSDPEFLYEVIEAAIAAGASTINIPDTVGYTTPSEFGALIGGINTHVPNIDEAVLSVHGHNDLGLAVANFLEAVKNGARQLECTINGIGERAGNAALEELVMALHVRRRYYNPFFGRAEDSPTPLTAVRTEEITKTSRLVSNLTGMVVQPNKAIVGANAFAHESGIHQDGVLKNRLTYEIVDAQTVGLSDNRISLGKLSGRSAVRARLEELGYDLSRDDLDEAFARFKDLADRKREITDRDLEAIVSEQVQQPEARYQLKLVQVSCGSSLQPTATVTLADEEGQEQTAASIGTGPVDAVCRALNALAGVPNELVEFSVKSVTEGIDAMGEVTIRLRRDGQLFSGHSADTDVVVAAAQAFVNALNRLVAGQHHQPIHPQRDTAEVSARPSL

SEQ ID NO: 181 - protein, 227 aa, Oryza sativa Indica Group
MGRGKIAIKRIDNTTNRQVTFSKRRGGLMKKARELAILCDADVGLIVFSCTGRLYDFSSSSMKSIIERYQEAGEEHCRLLNPMSEAKFWQREVTTLRQQVQNLHHNNRQLLGEEISNFTVRDLQLLQNQVEMSLHSIRNKKDQLLAEEILKLNEKGSLVQKENSELRKKFNIAHQRNIELHKKLNSGESTSSEQVTRSSKDPGESSTPRDSRVCIDLELSQKEVEDE

SEQ ID NO: 182 - protein, 409 aa, Oenococcus oeni PSU-1
MSKKVSHFVGILFLFQKKGLFKMIKKIQFFDTTLRDGEQTIGVNFSIEEKIAIAQQLEKWGIDVIEAGFPIASKGDFQAVQAVASSIKKARVTALARANKKDIDACVQATAPAIHKQIHIFIATSPIHRQSKLHMTKKEVLEKIKGSIEYAHHFFEIIEFSPEDATRTERTFLVQAIETAITAGASVINIPDTVGYTNPAEFADLFTYLRKNIPTFDEVIFSVHCHDDLGMAVANSLASIENGATRIEGTINGIGERAGNAALEEIAAALYVRKDYYHATDNINLKDTQATSEMISRYSKMPLPKNKAVVGNNAFAHESGIHQDGMLKNPQTYEILRPETVGGKSTRLPLGKLSGSHAVMEKLKEMGYPFDHESMKIIFPIFKERADKKALIDEKDLQVIMQQISEVKR

SEQ ID NO: 183 - protein, 318 aa, Pimpinella brachycarpa
MMVQQRDELGLSLSLSFPGSSHEQNKSNTTNNKHNQMPHASTPLELNLMPSQPLNLLHNNTTTWTHPASHDRKMEACRVDRRSLLTGIDVNRIPAMTVDMEEETGVSSPNSTISSLSGNKRSLVNERSELANGDEILESSRSDDEDGDNSRKKLRLTKDQSAILEESFKEHNTLNPKQKIALAKRLGLRPRQVEVWFQNRRARTKLKQTEVDCEFLKRCCQTLTEENRKLQKEVQELRALKSSPQFYMQMTPPTTLTMCPSCERVGGLQSATTTLSAGPSITQAEPLRSHPMSSNHHRLPFNPWASPQRPLDALHPRS

SEQ ID NO: 184 - protein, 390 aa, Leuconostoc mesenteroides subsp. mesenteroides ATCC 8293
MASKVTFYDTTMRDGEQTIGVNFSIEEKIEIAKGLDDYGVAAIEAGFPAASQKDFEEVKRIAEVVDNAKVVGLARMVRNDINAVIEATKDAKHPMIHVFIATSPIHREFKLHMTKAEILDKIKADVTFTKQHMQDIVFSPEDATRTEPDFLVASVQTAIDAGATMINIPDTVGYDTPEEYGEVFENLRQNIVGFDTVGWSTHTHNDLGMATANALAGIEHGATEIQGTINGIGERAGNVDMIEAAAAIHVRHEKFNAETDIVLAQSKAISDIVARATRMPVAGNKPIMGRNAFAHESGIHQDGYLKNPETYEILKPEMVGATASLPLGKLSGSHAVMSKLNSLGYEVTRDDMKSIFPIFKSVAEESDLITDDQLKVIMQVVEEKEMVSYQ

SEQ ID NO: 185 - protein, 391 aa, Solibacter usitatus Ellin6076
MSDRVYIFDTTLRDGEQSPGCSMTVPEKLTMARKLVELGVDILEAGFPIASEGDFDAVDAVSREFPWAQVAALARCCTLDVERAAKSLAHAKRPRIHTFIATSDIHLKFKLKKTQQQVLDEAVAAVELARRHVDDVEFSAEDGARTEPEFLEKISKAVVAAGARTVNIPDTVGYSTPKEYGALIGRIAKALGDCAIVSVHCHDDLGLAVANSLAAIEAGARQIECTINGIGERAGNCSLEEIVMILKTRADSYPYHTGIHTEHLYSASQLLTSTITFGPQPNKAIVGRNAFAHEAGIHQDGYLKEKTTYEIIDPRTVGIPEGSLVLGKHSGRHALNQRAIEMGYQLSKPELDDLYHRFTAVADHRKKGLMDEEIVALIKECQQKALGVAAD

SEQ ID NO: 186 - protein, 509 aa, Solibacter usitatus Ellin6076
MRDGEQAAGTRLGSREKLIIARQLALLNVDVIEAGYPNSSPEDFDAVQRIAAEIQGPAICALSRAVAADIEACGKALAGCPRPRIHTGIGASDIHIAGKFQDDRYGKSLAEKKRKILQMAIDAVTLARHYVAEVEFYAEDAGRADPVYLYEMIAAVIDAGASVVNIPDTTGYTVPEQYGALIAGIRTHVPGIDRAVISVHCHDDLGMAVANTLHGVLNGARQVEGTINGLGERAGNAALEEIVMALATRADYFGVHTGVNTRELHRTSRLVADLLGVQVPPNKAVIGANAFSHSSGIHVDGVLKKRETYEIMRPEDVGMTESRVVLTARTGRHGLLDRLRKLGYELSDLELDQAYRRFLSVADKKQEVFDEDLIAILRDEIHPLPAVYELQYLHIYSGTSAIPTATVRLLVSGDTREGAAIGDGPVDAVCRAISQVTATAAKLQRYEIRGVTSGTEAMGEVTIQLEEAGRKVIGRGASTDIIEASAKAYLDGLNKLANIAAASHRSAGA

SEQ ID NO: 187 - protein, 426 aa, Leptospira interrogans serovar Lai
LNIAKFLLQKLNVDRVEIASARVSKGELETVQKIMEWAATEQLTERIEILGFVDGNKTVDWIKDSGAKVLNLLTKGSLHHLEKQLGKTPKEFFTDVSFVIEYAIKSGLKINVYLEDWSNGFRNSPDYVKSLVEHLSKEHIERIFLPDTLGVLSPEETFQGVDSLIQKYPDIHFEFHGHNDYDLSVANSLQAIRAGVKGLHASINGLGERAGNTPLEALVTTIHDKSNSKTNINEIAITEASRLVEVFSGKRISANRPIVGEDVFTQTAGVHADGDKKGNLYANPILPERFGRKRSYALGKLAGKASISENVKQLGMVLSEVVLQKVLERVIELGDQNKLVTPEDLPFIIADVSGRTGEKVLTIKSCNIHSGIGIRPHAQIELEYQGKIHKEISEGDGGYDAFMNALTKITNRLGISIPKLIDYEVR

SEQ ID NO: 188 - protein, 435 aa, Leptospira interrogans serovar Canicola
FSTSEKLNIAKFLLQKLNVDRVEIASARVSKGELETVQKIMEWAETEQLTERIEILGFVDGNKTVDWIKDSGAKVLNLLTKGSLHHLEKQLGKTPKEFFTDVSFVIEYAIKSGLKINVYLEDWSNGFRNSPDYVKSLVEHLSKEHIERIFLPDTLGVLSPEETFQGVDSLIQKYPDIHFEFHGHNDYDLSVANSLQAIRAGVKGLHASINGLGERAGNTPLEALVTTIHDKSNSKTNINEIAITEASRLVEVFSGKRISANRPIVGEDVFTQTAGVHADGDKKGNLYANPILPERFGRKRSYALGKLAGKASISENVKQLGMVLSDVVLQKVLERVIELGDQNKLVTPEDLPFIIADVSGRTGEKVLTIKSCNIHSGIGIRPHAQIELEYQGKIHKEISEGDGGYDAFMNALTKITNRLGISIPKLIDYEVRIPP

SEQ ID NO: 189 - protein, 431 aa, Leptospira interrogans serovar Pyrogenes
FRELNIAKFLLQKLNVDRVEIASARVSKGELETVQKIMEWAATEQLTERIEILGFVDGNKTVDWIKDSGAKVLNLLTKGSLHHLEKQLGKTPKEFFTDVSFVIEYAIKSGLKINVYLEDWSNGFRNSPDYVKSLVEHLSKEHIERIFLPDTLGVLSPEETFQGVDSLIQKYPDIHFEFHGHNDYDLSVANSLQAIRAGVKGLHASINGLGERAGNTPLEALVTTIHDKSNSKTNINEIAITEASRLVEVFSGKRISANRPIVGEDVFTQTAGVHADGDKKGNLYANPILPERFGRKRSYALGKLAGKASISENVKQLGMVLSDVVLQKVLERVIELGDQNKLVTPEDLPFIIADVSGRTGEKVLTIKSCNIHSGIGIRPHAQIELEYQGKIHKEISEGDGGYDAFMNALTKITNRLGISIPKLIDYEVRIL

SEQ ID NO: 190 - protein, 434 aa, Leptospira interrogans serovar Autumnalis
FHFRKLNIAKFLLQKLNVDRVEIASARVSKGELETVQKIMEWAATEQLTERIEILGFVDGNKTVDWIKDSGAKVLNLLTKGSLHHLEKQLGKTPKEFFTDVSFVIEYAIKSGLKINVYLEDWSNGFRNSPDYVKSLVEHLSKEHIERIFLPDTLGVLSPEETFQGVDSLIQKYPDIHFEFHGHNDYDLSVANSLQAIRAGVKGLHASINGLGERAGNTPLEALVTTIHDKSNSKTNINEIAITEASRLVEVFSGKRISANRPIVGEDVFTQTAGVHADGDKKGNLYANPILPERFGRKRSYALGKLAGKASISENVKQLGMVLSDVVLQKVLERVIELGDQNKLVTPEDLPFIIADVSGRTGEKVLTIKSCNIHSGIGIRPHAQIELEYQGKIHKEISEGDGGYDAFMNALTKITNRLGISIPKLIDYEVRIPP

SEQ ID NO: 191 - protein, 427 aa, Leptospira interrogans serovar Australis
KLNIAKFLLQKLNVDRVEIASARVSKGELETVQKIMEWAATEQLTERIEILGFVDGNKTVDWIKDSGAKVLNLLTKGSLHHLEKQLGKTPKEFFTDVSFVIEYAIKSGLKINVYLEDWSNGFRNSPDYVKSLVEHLSKEHIERIFLPDPLGVLSPEETFQGVDSLIQKYPDIHFEFHGHNDYDLSVANSLQAIRAGVKGLHASINGLGERAGNTPLEALVTTIHDKSNSKTNINEIAITEASRLVEVFSGKRISANRPIVGEDVFTQTAGVHADGDKKGNLYANPILPERFGRKRSYALGKLAGKASISENVKQLGMVLSDVVLQKVLERVIELGDQNKLVTPEDLPFIIADVSGRTGEKVLTIKSCNIHSGIGIRPHAQIELEYQGKIHKEISEGDGGYDAFMNALTKITNRLGISIPKLIDYEVR

SEQ ID NO: 192 - protein, 435 aa, Leptospira interrogans serovar Hebdomadis
FSTSEKLNIAKFLLQKLNVDRVEIASARVSKGELETVQKIMEWAATEQLTERIEILGFVDGNKTVDWIKDSGAKVLNLLTKGSLHHLEKQLGKTPKEFFTDVSFVIEYAIKSGLKINVYLEDWSNGFRNSPDYVKSLVEHLSKEHIERIFLPDTLGVLSPEETFQGVDSLIQKYPDIHFEFHGHNDYDLSVANSLQAIRAGVKGLHASINGLGERAGNTPLEALVTTIHDKSNSKTNINEIAITEASRLVEVFSGKRISANRPIVGEDVFTQTAGVHADGDKKGNLYANPILPERFGRKRSYALGKLAGKASISENVKQLGMVLSDVVLQKVLERVIELGDQNKLVTPEDLPFIIADVSGRTGEKVLTIKSCNIHSGIGIRPHAQIELEYQGKIHKEISEGDGGYDAFMNALTKITNRLGISIPKLIDYEVRIPP

SEQ ID NO: 193 - protein, 198 aa, Picea sitchensis
MKNPELPVEMDEVEVKVDIQSTNASADEPRTAKRQGFELARIPEDPASKPTALSSPKKPKAASSSSSSPRAQPPACQVEKCAADLADAKEYYRRHRVCEQHSKARVVLVLGLQQRFCQQCSRFHVLEEFDEAKRSCRRRLAGHNERRRKTPSDSSVDRLDSNHHLNDNWLRHMTESDKMTMVLERNTTAKVCKEIKNH

SEQ ID NO: 194 - protein, 522 aa, Shewanella sp. ANA-3
MSNRVIIFDTTLRDGEQALAASLSVKEKLQIAMALERLGVDVMEVGFPVSSPGDFESVQTIARTIKNSRVCALSRALEKDIDAAAQALSVAEQFRIHTFISTSTIHVESKLKRSFEQVLEMAVGAVKYARRFTDDVEFSCEDAGRTPIDNLCRMVEAAIHAGARTINIPDTVGYTVPSEFGGIIQTLFNRVPNIDQAIISVHCHDDLGMSVANSITAVQHGARQIECTMNGIGERAGNCSLEEIAMILATRKNLLGVETGINAKEIHRTSNLVSQLCNMPIQSNKAIVGANAFTHSSGIHQDGMLKAQNTYEIMTPESIGLNRNNLNMTSRSGRHVIKHRMEEMGYSEQDFNLDALYEQFLHLADKKGQVFDYDLEALAFMEAQAAEDNFYQLQQLVVQSDSTEGVATATVRIDVGGEIKTEAATGNGPVDAAYNAIARATDRRIDIISYKLGAKGEGQNALGQVDITAVYHEQNFHGVGLATDVVEASARALVHVMNLTCRADKVADYKQNMHKNRELGGV

SEQ ID NO: 195 - protein, 513 aa, Magnetococcus sp. MC-1
MSENRIVIFDTTLRDGEQSPGCSMNVEEKLRIARQLERLKVDVIEAGFPIASPGDFIGVKTVADTIKECQVAGLCRAKDTDIDRAWEALQGAVDPRIHTFIATSPIHMQHKLRMEPDEVIEAAVAAVKRAKSHTSNVEWSAEDAGRTEPDFLCRIVEAVIAAGATTVNIPDTVGYTLPHEYGERIRTLCERVPNIHKAIISVHCHNDLGLAVANSLSAVINGARQVECTINGLGERAGNASLEEVVMALRTRKDILPYSCGVDTTEIMRSSKLVSSVTGFPVQPNKAIVGANAFAHESGIHQDGVLKKADTYEIMTPASVGLSTNRMVLGKHSGRHAFKERLKSLGHDLDNEQLKRAFERFKELADKKHELFDEDLEVLVDEEMYRHFGAYYKLTRLHVASGTRDTPVAVVQVEYNGEESMHSAWGKGSVESVFNALRKLIPEAAEAEVLLYQVRAVTEGIDAQGEVTVRLRLGESIVQGQGADTDIIIASAHAFINALNKAAYQRHKPGKGV

SEQ ID NO: 196 - protein, 394 aa, Magnetococcus sp. MC-1
MDQSTVILDDTTLRDGEQSAGVAFSLEEKLKIATLLDRAGVPELEVGIPAMGEEERQDIRAIAQLGLRARLLVWLRMHDADISHLPGLGVAMADLSTSASDQQIRHKLGRNRRWVLNTIQHQVTRVSQEMGIEVCVGCEDASRAEIDFLLRMGETAQKAGAKRLRFADTLGILDPFTTYERFKTLRANLDLELEIHAHDDLGLATANTLAAIRGGASHANTTVNGLGERAGNAPLEEVAVALQTLHGGYTGIQCDQLQVLSQFVESASGRPLSCQKSVVGSAVFRHESGIHVDGLLKDRRNYQGVDPDILGRHHELVLGKHSGRQGVIDAYGRMGIAISQELAGQLLQSVKGFATRYKRSPEQAELQSFYRFLTEPAPLTPANHGGLLHATPRV

SEQ ID NO: 197 - protein, 459 aa, Coccidioides immitis RS
MSATNGHANGVNGVNGTGLPNHPGYTAIPARENPHPHTARNPYGHNAGVTDFLSNVSRFKIIESTLREGEQFANAFFDTQKKIEIAKALDDFGVDYIELTSPCASEQSRKDCEAICKLGLKAKILTHIRCHMDDARVAVETGVDGVDVVIGTSSYLREHSHGKDMTYIKNTAIEVIEFVKSKGIEVRFSSEDSFRSDLVELLSLYSAVDQVGVNRVGIADTVGCASPRQVYELVRVLRGVVKCDIEIHLHNDTGCAIANAYCALEGGATHVDTSVLGIGERNGITPLGGLMARMIAVDRDYVMSKYKLHKLKDIEDLVAEAVEINIPFNNYITGFCAFTHKAGIHAKAILNNPSTYEIINPADFGMTRYVHFASRLTGWNAIKSRAQQLNLEMTDAQYKECTAKIKALADIRPIAIDDADSIIRAYHRNLKSGEDHPLLDLTADEKAQFAAKEKEYTEA

SEQ ID NO: 198 - protein, 249 aa, Beta vulgaris
MEFPTQTMEGSPSSQRKMGRGKIEIKRIENTTNRQVTFCKRRNGLLKKAYELSVLCDAEVALIVFSSRGRLYEYANHSCSVKGTIDRYKKACSDQSGAGSVAEANAQYYQQEAAKLRNQIRTATENNRLLSRHMMGEGLSSLSMKELKNLETKLERGISRIRSKKNELLFAEIEFMQKREIELHNNNQFLRARISENERAQQSMSLMPGGSDYDLVPSQSFDSRNYFQVNALQPSSQYARQDQTPLQLV

SEQ ID NO: 199 - protein, 517 aa, Alteromonadales bacterium TW-7
MQDKDKVWIFDTTLRDGEQALKASLTEDDKIQLAHTISRLNVDVMEVGFPVSSPADFRSVQRIATEVKGPIICGLARSVAKDIEACGEALRTAQQSRIHTFIATSPLHLEHKLRMSLDDATAMAVKSIKLARNYTDDVEFSCEDAGRTPHWDLCKIVEQAIKAGASTINLPDTVGFVTPDEYAAMIRHLMNNVPNIDKARLSVHCHNDLGLAVANSVAAVQAGARQIECTINGIGERAGNCSLEEVAMIMKMRKDHLKVHTDIKSEEIYRASRQVAKICNMPVQPNKAIVGENAFAHSSGIHQDGVLKAQNTYEIMSPESVGVPNNQLNMTSRSGRHVIEHRLEELGYQKADYDMDSLYESFLALADQKGTVYDYDLEAMIYLNQINDKDEKYQLEFVNSASNSQSVASSTIGMVIDGEVKQEAATGNGPVEASFAAIERLTGMSVEMIEYNLEATGQGASSLGQVNIIAKYDGRPYHGAGIAADVVEASVRAMIRVYNLIYRAQKVSDLKQQRKAG

SEQ ID NO: 200 - protein, 515 aa, marine gamma proteobacterium HTCC2143
MSTKDNLIIFDTTLRDGEQSPGASMTRDEKVRIAKMLEKMHVDVIEAGFAIASGGDFDAIKAVAETVQDSTICSLSRAMPADIKRTAEAIKSANSGRIHTFIATSPIHMKYKLMMSPEQVLEQAVGMVSLARNLCGDVEFSLEDGSRSEFDFQCRMIEAVIDAGATTINIPDTVGYGTPEEYGAMFKNIMERVPNADKAIFSTHCHNDLGLAVANSLAAVMNGVRQVECTINGLGERAGNASLEEIVMAVKTRADVFPVTTRIDPIHIVPTSRLVSSITGFPVQPNKAIVGANAFAHESGIHQDGILKHRETYEIMKAEDVGWKSNKLVLGKHSGRAAVRARFEELGVTFESPEELGHAFARFKELADKKHEIFDEDLQALVSRVTAPSIAEKFQFSNLEATSKSGVKPHASLTLTIAGVDHQTESEGDGLVDAAFKAIEKIASSQTALQLYLVSAVTQGTDSLGDVTVRLEKEGEIVNGLGSDTDVIVASVKAYLNALNVLDAGVIKAHPQSGV

SEQ ID NO: 201 - protein, 309 aa, Brachypodium sylvaticum
MMARGGGGSLDLGLGLGLGLASQGSLTSSTTTASSSPGSHQQGQHWHAALSSVVAADAGAAARSEFPSSYQQQRYNQQRHQEGRTSTSPESGAALSGVSGGGGGIKRALERTGSGVSRGAAISDEDEDGDGAGAGGRKKLRLSKDQAAVLEECFKTHSTLNPKQKTALANRLGLRPRQVEVWFQNRRARTKLKQTEVDCEYMKRWCEQLADQNKRLEKEVAELRALKAASAPAAQQQSAATLTMCPSCRRVATTQQQQCHPKPNAQAAAGNVVPSHCQFFPSTAAAGDRSTRQATWNSAPPPLVTRELF

SEQ ID NO: 202 - protein, 136 aa, Capsicum annuum
MDTNKWEGKRTINEAEEEEDEHESVEEDNKRKRVLSPSGRKLSGGGSSHPSCQVEQCTADMANAKPYHRRHKVCEFHSKSSIVLISGLQQRFCQQCSRFHLLAEFDEAKRSCRRRLAGHNERRRKISYDSQGESLN

SEQ ID NO: 203 - protein, 435 aa, Leptospira meyeri serovar Semaranga
FSWQQKLNITKHLLMDLKANRVEIASARVSPGEFEAVKKIVEWAKSEGLHDRIEILGFVDFDKTVEWMKGTGVRVLNLLTKGSLNHLTNQLRKTPSEHFLDIQKTVEFAAASGIAVNVYLEDWSNGYIHSRDYVLEYLRVVSKFPVRKFYLADTLGVLSPLEVRTAITDLVKEFPDLWFEFHGHNDYDLAVANCLEAVSAGVRGLHVAVNGLGERAGNSPLEAVVTAIHDKTKFKTSIVEKEITNASRLVAVFSGKRISDNRPIVGEDVFTQTAGVHADGDKKGNLYANPILPERFGRSRVYALGKLAGKASITENLKQLGMVLSPEIEKKVLERVIELGDQNKTVTKEDLPYIISDITGENLEASFRIETCTVTSGIGVKPKAEVKVNFQGKLYEAKGEGDGGYDAFMNALGKILKELKIQIPKLYDYEVRIPP

SEQ ID NO: 204 - protein, 396 aa, Azoarcus sp. BH72
MSAPVTIDDTTLRDGEQSAGVAFTRAEKCGIARILAEIGVPELEIGIPAMGSEECGDIRAIADTLADGGHDTRLIVWGRLTSADIDACRSLPVQMLELSVPVSDQQIRHKLGATRDEVLARIARWVPVAREAGFDVGVGGEDASRADPAFLAEVIQAAEAAGARRFRFADTLGILDPFATFEAIRALRAASKLEIEMHAHDDLGLATANTLAAVRAGASHVNTTVNGLGERAGNAALEEVALGLRQFHGMGEIIDFTRLLDTSEAVARASGRPVGWHKSVVGEGVFTHEAGIHVDGLLKDPANYQGIDPALLGRSHRMLLGKHSGGRGVAAAYAGLGIELDAARTACLLARIREFTSRTKRTPQREDLLAFWEELEAGSAQCDDLLHDLLDTAAGA

SEQ ID NO: 205 - protein, 511 aa, Azoarcus sp. BH72
MKDALIIFDTTLRDGEQSPGASMTRDEKLRIARQLERMRVDVIEAGFAAASNGDFESVRSIAEAIKESTVCSLARANENDIRRAGEAIRPAARGRIHTFIATSPIHMEKKLRMTPDQVVEQAVKAIGWAREYTDDIEFSAEDAGRSEIDFLCRIFDAVIKAGAKTINVPDTVGYNVPEQYAATLRTLIERVPNADKVIWSVHCHNDLGLAVSNSLAAVMAGARQVECTINGLGERAGNASLEEIVMAVRTRADVFPVSTNIDTTQIVPASKLVSQITGYPVQPNKAIVGANAFAHESGIHQDGVLKHRETYEIMRAEDVGWGANKLVLGKHSGRNAFRARLQELGIEIGSEEQLNHAFARFKELADKKHEIFDEDLHALMSDEAVTPEQEHFRLVATRFHSETGETPRAEVTLAIGGQETRSQAEGSGPVDAAFKAIESVAGSGSELLLYSVNAITTGTDAQGEVTVRLAKDGRVVNGQGADTDIIVASAKAYLNALNKLCGGSEKLNPQV

SEQ ID NO: 206 - protein, 106 aa, Phillyrea latifolia
LNLRPRQVEVWFQNRRARTKLKQTEVDCEYLKRCCETLTEENRRLQKELQELRALKTSQPFYMQLPATTLTMCPSCERVATTPFLFWHHQHHHHNPSTTHHHHHHH

SEQ ID NO: 207 - protein, 512 aa, Acidovorax sp. JS42
MTDKLIIFDTTLRDGEQSPGASMTRDEKLRIARQLERLRVDVIEAGFAASSNGDFESVQAIARAVKDSTVCSLARANDRDIARAAEALKEANRARIHTFIATSALHMEKKLRMTPEQVLEQARQAVRFARNLVEDIEFSPEDGYRSDPDFLCRVIETVIAEGATTINVPDTVGYAIPELYGNFIKNLRERIPNSDKAIWSVHCHNDLGMAVANSLAGVKIGGARQVECTINGLGERAGNCSLEEVVMAVKTRRDYFGLDVGIDTQHIVAASRMVSQTTGFVVQPNKAVVGANAFAHASGIHQDGVLKARDTYEIMRAEDVGWSANKIVLGKLSGRNAFKQRLQELGVQLESEGEINVAFAKFKELADRKSEIFDEDILALVSDESVTSEKEQFGFVSLAQHSETGERPEATIVFTVDGKEVRSSSEGNGPVDASMKAIEAHVRSGAEMVLYSVNAISGSTESQGEVTVRLQSAGRVVNGVGADPDIVVASAKAYLSALNKLQSKAERVAAQG

SEQ ID NO: 208 - protein, 517 aa, Neisseria meningitidis FAM18
MTQANRVIIFDTTLRDGEQSPGAAMTKEEKIRVARQLEKLGVDIIEAGFAAASPGDFEAVNAIAKTITKSTVCSLSRAIERDIRQAGEAVAPAPKKRIHTFIATSPIHMEYKLKMKPKQVIEAAVKAVKIAREYTDDVEFSCEDALRSEIDFLAEICGAVIEAGATTINIPDTVGYSIPYKTEEFFRELIVKTPNGGKVVWSAHCHNDLGLAVANSLAALKGGARQVECTVNGLGERAGNASVEEIVMALKVRHDLFGLETGIDTTQIVPSSKLVSTITGYPVQPNKAIVGANAFSHESGIHQDGVLKHRETYEIMSAESVGWATNRLSLGKLSGRNAFKTKLADLGIELESEEALNAAFARFKELADKKREIFDEDLHALVSDEMGSMNAESYKFISQKISTETGEEPRADIVFSIKGEEKRASATGSGPVDAIFKAIESVAQSGATLQIYSVNAVTQGTESQGETSVRLARGNRVVNGQGADTDVLVATAKAYLSALSKLEFSAAKPKAQGSGTI

SEQ ID NO: 209 - protein, 247 aa, Oryza sativa Indica Group
MMERAEDLRLSLSLSSPLIAPRTHHVAMLFHAPPEKRFLEMPLLPAAKRSEVVAAEEERAGLRGGGGSDEEDGGCGIDGSRKKLRLSKDQSAVLEDSFREHPTLNPRQKATLAQQLGLRPRQVEVWFQNRRARTKLKQTEVDCEFLKRCCETLTEENRRLQKEVQELRALKLVSPHLYMNMSPPTTLTMCPSCERVSNTNNNSSAAAAADRRGIRTTTAAAGGSVVDTAADGGILCHRPIAVRPQQS

SEQ ID NO: 210 - protein, 695 aa, Physcomitrella patens
MAMALNGSQVQSGISSSGTQAPENCWSSTSWEHQNLTDSSSMEGSGEGDYVGSGRMEWDLKANSWEWPENLTMVYPRQGDGNQRLHNNDWPASAACSAVTLATTSAGASDFSIGLASGSSTISGTLSVSSGIPGVSAGRGSCGADLSSVVKSEPDEHGMERTVVGTPATLSGHKDRLLFDLGGVQSRGNGEKFSEKNESARAAGDQSNGSSVVSGGGDSLNIGLKLGRRTYFEDSFGGGQAKGSSSPAPSPPGKKQRVVAPNVQIARCQVEGCKADLSGCKDYHKRHKVCEMHSKAPKCIAAGIEQRFCQQCSRFHVLTEFDEGKRSCRRRLAGHNERRRKPHPETHSVFGLRNSSSLYSDTSTLTMDAAPFYFLDSKRTSFLHRHGGSSLEDEFHPYSDSLKRTNPWSTLRRDYSNLACQFQAASAERQSIFSTLSRPTADRLLSLLQNPKTQMPAPNTSTGMNLGGHHFLEGPVGPLGQGLSLSSSTGGALGSLEQSRIDSCSQSLSSVSGLTNTGRALSLLSSQSWASRPPPGASAPVSLGLSQAYDSTLEQLVASSSDSSNRGSRFSHHLQLPSGGSSSSSQQQFEKQFSVQARDLESVGLNCGLTATGNGNILASLGGGYEETNSMLALVQAGQDIQALNSGSSHHARPTIDLMQMPSSHSNGLHSQVSGGQYNGFSALRPFESSIFSTQ

SEQ ID NO: 211 - protein, 694 aa, Physcomitrella patens
MAMAVNGSHVHSGISSSGPQAPENCWSSTSWEHQNLTDSSSMEGSGGVDYVGSGRMEWDLKANSWEWENLTMVYPQQGEGNQRLHNNDWPVSAACSAVTLATTSAGASDFSIGLASGSSTPSGALSVSSGIPGVSAGRGSCGADLSSLVKSEPDENGAERTVLGTPATLNGHKHRLLFDLGGVQSRGNGERSPEKDDNTRAAAVPSNGSSAVSGAGDSLNIGLKLGRRTYFEDSTGVGHAKGLSSPAPSPPGKKQRVVAPSMQIARCQVEGCKADLSGCKDYHKRHKVCEMHSKAPKCIAAGIEQRFCQQCSRFHVLTEFDEGKRSCRRRLAGHNERRRKPHPETHSVFGLRNSSPLYSDSSTLTMDSAPFYFLDSKRSSILHRHRGSSLDDELHSYSDTLKRTNPWSTLRRDENSLACQLQAASAERQSIFSTLSRPTADRLLSLLQNPKSQMPAPNTSTGMNLGNHHFLEGPLGPLGQGLSLSSSTGGVLGSLEQSRVGSCSQSLSSVSGLANSGRALSLLSSQSWASRPTQGASVPVSLGLSQADDSTLEQLVASSSDCSNRGSRFSHHLQLPCGGSSTSAQQQFDKQLSIQSGGLESVGLNCGLAATGNGNILSGLGGGYDETNSILALVQAGQDIQALNSGSSHHARPTIDLMQMPSSHSNGLHSQVSGSQCSGFNALRPFESSVFSTQ

SEQ ID NO: 212 - protein, 503 aa, Arabidopsis thaliana
MASLLLTSSSMITTSCRSMVLRSGLPIGSSFPSLRLTRPYDKATLFVSCCSAESKKVATSATDLKPIMERRPEYIPNKLPHKNYVRVLDTTLRDGEQSPGAALTPPQKLEIARQLAKLRVDIMEVGFPVSSEEEFEAIKTIAKTVGNEVDEETGYVPVISGIARCKKRDIEATWEALKYAKRPRVMLFTSTSEIHMKYKLKKTKEEVIEMAVNSVKYAKSLGFKDIQFGCEDGGRTEKDFICKILGESIKAGATTVGFADTVGINMPQEFGELVAYVIENTPGADDIVFAIHCHNDLGVATANTISGICAGARQVEVTINGIGERSGNAPLEEVVMALKCRGESLMDGVYTKIDSRQIMATSKMVQEHTGMYVQPHKPIVGDNCFVHESGIHQDGILKNRSTYEILSPEDVGIVKSENSGIVLGKLSGRHAVKDRLKELGYEISDEKFNDIFSRYRELTKDKKRITDADLKALVVNGAEISSEKLNSKGINDLMSSPQISAVV

SEQ ID NO: 213 - protein, 284 aa, Glycine max
MTVQKEDLGLSLSLSFPLLSSSPSSHNPQKPSWNDPIFTSSGEAGSFLRGIDVNRLPSVVDCEEEAGVSSPNSTVSSVSGKRSERETNGEENDTDRACSRGIISDEEDAETSRKKLRLSKDQSIVLEESFKEHNTLNPKQKLALAKQLGLRARQVEVWFQNRRARTKLKQTEVDCEFLKRCCENLTEENRRLQKEVQELRALKLSPQFYMHMTPPTTLTMCPSCERVAVPPSSAVDPATRHHHVPPSHPRAFPIGHGQALRCPPSQILDSRKQNDKIEKKDRKP

SEQ ID NO: 214 - protein, 546 aa, Prochlorococcus marinus str. MIT 9515
MSKDPGRILIFDTTLRDGEQSPGASLNLEEKLAIAHQLARLGVDVIEAGFPFASPGDFKAVNKISEVVGGENGPIICGLARASTSDIKACYEAIIPAPKKRIHTFIATSDIHLKHKLRKSRKDVLSIVPEMVSYAKSLVDDIEFSCEDASRSDPEFLYEVIQLAITSGATTINIPDTVGFTTPSEFGKLIFDINKNVPNIDEAVISVHGHNDLGLAVANFLEAAKNGARQLECTINGIGERAGNASLEELVMALHVRKSFFNSFFGRSSDSPTPLTAIRTEEITKTSRLVSNLTGMNVQPNKAIVGANAFAHESGIHQDGVLKNRLTYEIIDAKTVGLNDNKISLGKLSGRSAVRARLEEMGYDLSREDLNDAFARFKDLADRKREITDRDLEAIVSEQVQLPESRFQLSHVQVSCGSTSKPTATVTILNTETHTEDTSVAIGTGPVDAVCEAINELAKVPNELIEFSVKSVTEGIDALGEVTIRIRNKNKIYSGHSADTDVVVAAANAFLNALNRLIFSEKKECIHPQFDNLENSEKKVFSNPKN

SEQ ID NO: 215 - protein, 546 aa, Prochlorococcus marinus str. AS9601
MSKDPGRILIFDTTLRDGEQSPGASLNLEEKLAIAHQLARLGVDVIEAGFPFASPGDFKAVNKIANAVGKENGPIICGLARASKGDIKACYEAVSPAPKKRIHTFIATSDIHLKHKLKKSRKDVLQIVPEMVNYAKSLVDDIEFSCEDASRSDPDFLYEVIQLAISAGATTINIPDTVGFTTPSEFGNLIADINKNVPNINEAVISVHGHNDLGLAVANFLEAVKNGARQLECTINGIGERAGNASLEELVMALHVRKSFFNSFFKRNPDSPTPLTAIRTEEITKTSRLVSNLTGMTVQPNKAIVGANAFAHESGIHQDGVLKNRLTYEIIDAKTVGLSDNKISLGKLSGRSAVRARLEEMGYDLSREDLNDAFARFKDLADRKREITDRDLEAIVSEQVQLPEAKFQLSLVQVSCGNASKPTATISLLNTEDNTEDTAVSIGTGPVDAVCEALNKLAKVPNELIEFSVKSVTEGIDALGEVTIRIRRDNKIYSGHSADTDVVVAAANAYVNALNRLVFSEKKNSIHPQFDSLENSTNTFLSNNAN

SEQ ID NO: 216 - protein, 540 aa, Prochlorococcus marinus str. MIT 9303
MAKDPGRVLIFDTTLRDGEQSPGASLNLEEKLAIAQQLARLGVDVIEAGFPFASQGDFSAVQRIAQQVGGDEGPIICGLARASRADIKACADAVAPAPRRRIHTFIATSDIHLEHKLRKSRAEVLAIVPEMVAYARSLVDDVEFSCEDAARSDPEFLYEVIEAAIAAGAGTINIPDTVGFTTPSEFGALIAGIDCHVPNMNEAILSVHGHNDLGLAVANFLEAVKSGARQFECTINGIGERAGNAALEELVMALYVRRRYFNPFFGRESDSPTPLTAVRTEEITKTSRLVSNLTGMVVQPNKAIVGSNAFAHESGIHQDGVLKNRLTYEIVDARTVGLTDNRISLGKLSGRSAVRARLEELGYDLTREDLDEAFARFKDLADRKRDITDRDLEAIVSEQVQQPEARFQLRLVQVSCGSSLRPTATVILAQEDGQEQTAAAVGTGPVDAVCRALNALAGEPNELIEFSVKSVTEGIDAMGEVTIRLRRDGQLFSGHSADTDVVVAAAQAFVNALNRLVAGCGRQSLHPQHDAVLADRRPGI

SEQ ID NO: 217 - protein, 539 aa, Prochlorococcus marinus str. NATL1A
MAKDPGRVLIFDTTLRDGEQSPGASLNLEEKLAIAQQLARLGVDVIEAGFPFASPGDFAAVQKIAENVGGEEGPIICGLSRASKPDIKACANAIAPAPKKRIHTFIATSDIHLEHKLRKSRKEVLDIVPDMVGYAKSFVDDVEFSCEDAARSDLDFLYEVIELAISSGANTINIPDTVGYITPSEFGDLILNINENVPNINEAVLSVHGHNDLGLAVANFLEAVKNGARQLECTINGIGERAGNAALEELIMALHVRRSYFNPFFGRPPESPTPLTAVRTEEITKSSRLVSNLTGMVVQPNKAIVGANAFAHESGIHQDGVLKNRLTYEIIDAKTVGLSDNKISLGKLSGRSAVRARLEDLGYDLNREDLNDAFARFKDLADRKREITDRDLEAIVSEQVQLPEALFQLKLVQVSCGTSLMPTATVTVVGEDGEEKTAVSLGTGPVDAVVRALDSLTEEPNELIEFSVKSVTEGIDALGEVTIRIRRDGNLFSGHSADTDVVVAAAQAYINALNRLVAAHGRKSIHPQHDLAKVDKKGI

SEQ ID NO: 218 - protein, 411 aa, Medicago truncatula
MAQQCQLTSPFHLFLFCPLHFSTTIHSSFLNVFTLTKQQQPPPLPRPPHTTILTLHLSLTNEHNLATTTKPYTPMDSGGNSSSEESSLNGLKFGQRIYFEDTALTAASAAAASTTIAAGSPSSSGSKKGRGGSVQHSQPPRCQVEGCKLDLTDAKAYYSRHKVCSMHSKSPTVTVSGLQQRFCQQCSRFHQLAEFDQGKRSCRRRLAGHNERRRKPPPSSLLTSRFARLSSSVFGNSDRGGSFLMEFASNPKHSLRNSPGNQTTAIGWPWPGNTESPSSNLFLQGSVGGTSFPGARHPPEETYTGVTDSNCALSLLSNQTWGSQNTEPSPGLNNMLNFNGTPMTQLGTSSHGVAMHQIPNNYEVVPDLGRGHILHPLGSQHSGELDLLQQGRRHYMDVEHSRAYESSQWSL

SEQ ID NO: 219 - protein, 322 aa, Oryza sativa Indica Group
MDWMPPPKPTSPRSPPLLWDWADAAVPGSSSGEVSAAAAHPGRRRKEKRGRAEEGGGGGGEVRCQVEGCGVELVGVKDYHRKHRVCEAHSKFPRVVVAGQERRFCQQCSRFHALSEFDQKKRSCRRRLYDHNARRRKPQTDVFSYASARPPSSLLFDDNRQISFVWNKAPLSHVRPFAISPWESSSEVGTTDGHIYLDKSHISKSLPAFNTDIDELLPMKGPDASLTASKFDGAPDLQRALSLLSSSSCGLPDPVQQASRVIQFTGASQNNRELPPLNGGNSASASCANVQTIAQPAQLVRFTMNASSNACQSNFFGLNQIN

SEQ ID NO: 220 - protein, 338 aa, Oryza sativa Indica Group
MMNVPSAAAASSCDDFGYNATPPPPPSLLPIMDQDGGGGSIQRDHHHHHNHQQLGYNLEPSSLALLPPSNAAAAAAHHATIAHASPHDLLQFYPTSHYLAAAGGAGGGGNPYSHFTAAAAAGSTFQSYYQQPPQAAPEYYFPTLVSSAEENMASFAATQLGLNLGYRTYFPPRGGYTYGHHPPRCQAEGCKADLSSAKRYHRRHKVCEHHSKAPVVVTAGGLHQRFCQQCSRFHLLDEFDDAKKSCRKRLADHNRRRRKSKPSDGEHSGEKRRAQANKSAATKDKAGSSSKNAGIGDGFETQLLGGAHMSKDQDQAMDLGEVLKEAVDPKVFLVGEAG

SEQ ID NO: 221 - protein, 213 aa, Oryza sativa Japonica Group
MGRGKIAIKRIDNTMNRQVTFSKRRGGLMKKARELAILCDADVGLIVFSCTGRLYDFSSSSMKSIIERYQEAGEEHCRLLNPMSEAKFWQREVTTLRQQVQNLHHNNRQLLGEEISNFTVRDLQLLQNQVEMSLHSIRNKKGSLVQKENSELRKKFNIAHQRNIELHKKLNSGESTSSEQVTRSSKDPGESSTPRDSRVCIDLELSQKEVEDE

SEQ ID NO: 222 - protein, 248 aa, Oryza sativa Japonica Group
MMERAEDLRLSLSLSSPLIAPRTHHVAMLFHAPPEKRFLEMPLLPAAKRSEVVAAEEERAGLRGGGGSDEEDGGCGIDGLTQEAPGLSKDQSAVLEDSFREHPTLNPRQKATLAQQLGLRPRQVEVWFQNRRARTKLKQTEVDCEFLKRCCETLTEENRRLQKEVQELRALKLVSPHLYMNMSPPTTLTMCPSCERVSNTNNNSSAAAAADRRGIRTTTAAGGGSVVDTAADGGILCHRPIAVRPQQS

SEQ ID NO: 223 - protein, 338 aa, Oryza sativa Japonica Group
MMNVPSAAAASSCDDFGYNATPPPPPSLLPIMDQDGGGGSIQRDHHHHHNHQQLGYNLEPSSLALLPPSNAAAAAAHHATIAHASPHDLLQFYPTSHYLAAAGGAGGGGNPYSHFTAAAAARSTLPVVLPAAAAGRAGVLLPTLVSSAEENMASFAATQLGLNLGYRTYFPPRGGYTYGHHPPRCQAEGCKADLSSAKRYHRRHKVCEHHSKAPVVVTAGGLHQRFCQQCSRFHLLDEFDDAKKSCRKRLADHNRRRRKSKPSDGEHSGEKRRAQANKSAATKDKAGSSSKNAGIGDGFETQLLGGAHMSKDQDQAMDLGEVVKEAVDPKVFLVGEAG

SEQ ID NO: 224 - protein, 511 aa, Clostridium thermocellum ATCC 27405
MRRIRIFDTTLRDGEQTPGVNLNIQEKVDIAKQLARLGVDVIEPGFPLTSPGDFEAVQRIAREVEGPYICGFSRAIIRDIDETWKAIKDAQKKCFHIFISSSDIQIKHQLGKTEKDVLEIVKSTVYHAKQYTDEVEYSPMDASRTRLEFLYEVIEAAIDNGATVINIPDTVGYATPIEFGELIQKIRKNVRNIDKAIISVHCHNDLGMAVANSIVAAMNGAQQIECTINGVGERAGNAALEEVVTHIAARKDYLGFETGIDLSQLYKTSKIVSRYMGIPIPVNKPIVGKNVFTHESGIHQDGVLKERSTYEVIDPRLVGRDDSVILLGKHSGRHALKVEAEKLGYDLDEERLNKLFNDFKKLTDVKKNVTTADLESLIIESAAKAVEEAYVLEKIRVVSGNIETPSAKVVIKDSKGNLLEAEQTGNGPVDAVFKAINSVIKETENLTLYKYSVSAVTEEMESLGEVSVTLREKEKLYTGIGTHTDIITSSAIAYIDAINKAIAANARAQKN

SEQ ID NO: 225 - protein, 377 aa, Gloeothece sp. KO68DGA
MNHIHINDTTLRDGEQAAGIVFSAAEKIAIAVLLDAIGTPELEVGIPAMGGNEAEAITTIARLGLNTALLGWNRAIRSDIEASIACGLKRVHVSVPVSDIQIKAKFQGNSQLVFQRLEESLKFALDHGLFVSVGAEDSSRADTAFLSEVAQFAQDLGASRFRFCETVGILDPLTTAQKVGKLVKSLKIPVEMHTHNDFELSTANALAGIKAGAQSVDTTVNGLGERAGNAALEEMIMALKQLYQVDLGFDTSRLRELSQLVIQASGVSLPPWKAIVGENIFAHESGIHAHGVLQNPQTYEPFSPDEVGWERRLVVGKHSGRHLLLNLLSQHGIRLDHEESQVVLEAVRHLSVQMKRSLTVEELLDLVPNRRMSHGIV

SEQ ID NO: 226 - protein, 516 aa, Marinobacter sp. ELB17
MSANDHLVIFDTTLRDGEQSPGATMNKAEKLRIAKALEKLRVDVIEAGFAIASQGDFEAIKGIAETIKDSTICSLARAIDGDIDRAAEAVRPANRSRIHTFIATSPIHMKHKLNMAPDEVVEQAVRAVKRARNHVADVEFSCEDAGRSELDFLCRIIEAAIDAGATTINIPDTVGYAIPHQFGNTMAQLLNRIPNADKAIFSVHCHNDLGLAVANSLAAVSQGARQVECTINGLGERAGNASLEEIVMAVRTRQDYFNLDTRIDATYIVPASRLVSTITGFPVQPNKAIVGANAFAHESGIHQDGVLKHRETYEIMRAEDVGWHTNSLVMGKHSGRNAFRTRLLELGIQFGTETELNEAFARFKALADLKHEIFDEDLQAIASNTRQKDQLGRFGLVCMKVCSETGVIPKADLTITMDDKEHRVQAEGSGPVDATFKAIESLVDSGCKLQLYSVNNITSGTDSQGEVTVRLERGGRIVNGVGADTDIIIASAKAYIAALNLISAGGIRHHPQEADV

SEQ ID NO: 227 - protein, 546 aa, Prochlorococcus marinus str. MIT 9301
MSKNPGRILIFDTTLRDGEQSPGASLNLEEKLAIAHQLARLGVDVIEAGFPFASPGDFKAVNKIASAVGKEHGPTICGLARASKGDIKACYEAVSPAPKKRIHTFIATSDIHLKHKLKKSRKDVLQIVPEMVNYAKSLVDDIEFSCEDASRSDPDFLYEVIQLAISAGATTINIPDTVGFTTPSEFGNLIADINKNVPNIDEAVISVHGHNDLGLAVANFLEAVKNGARQLECTINGIGERAGNASLEELVMALHVRKSFFNSFFKRNPDSPTPLTAIRTEEITKTSRLVSNLTGMTVQPNKAIVGANAFAHESGIHQDGVLKNRLTYEIIDAKTVGLSDNKISLGKLSGRSAVRARLEEMGYDLSREDLNDAFARFKDLADRKREITDRDLEAIVSEQVQLPEAKFQLSLVQVSCGNASKPTATISLLNTEDNTEDTAVSIGTGPVDAVCEALNKLAKVPNELIEFSVKSVTEGIDALGEVTIRIRRDNKIYSGHSADTDVVVAAANAYINALNRLVFSEKKNSIHPQFDNLENSNNTYISNPAN

SEQ ID NO: 228 - protein, 397 aa, Clostridium difficile 630
MCVISKDRAKEIKIVDTTLRDGEQTAGVVFANREKIMIAEMLSDLGVDQIEVGIPTMGGDEKNVIKHICSRNLKSDIMAWNRAVIKDVEESISCGVDAVAISISVSDIHIENKLRTSRGWVLENMAKTVEFAKKNGLYVSVNGEDASRADIDFLTEFINVGKQAGADRFRYCDTVGVMNPFSIKNAIETLYERTNFDIEMHTHNDFGMATANALAGIAAGANYVGVTVNGLGERAGNAALEEVLMALKCVYKCDLNNIDTRKFRGICEYVAQASGRILPTWKPVVGDNMFIHESGIHADGALKDPHNYEPFDPSEVNLERKIVIGKHSGRAAVVNKLSEYEMYISPENATKLLNAIRATSIRLKRSLMDKEILQLYCDILAHEKGTTEEEAVRGSYI

SEQ ID NO: 229 - protein, 382 aa, Azotobacter chroococcum (strain mcd 1)
MASVIIDDTTLRDGEQSAGVAFNADEKIAIRRALAELGVPELEIGIPSMGEEEREVMRAIAGLGLSSRLLAWCRLCDFDLSAARSTGVTMVDLSLPISDLMLRHKLNRDRDWALGEVARLVSEARMAGLEVCLGCEDASRADQDFIVRVGAVAQAARPPPAFADTVGVMEPFGMLDRFRFLRQRLDVELEVHAHDDFGLATANTLAAVMGGATHINTTVNGLGERAANAALEECVLALKNLHGIDTGIDTRGIPAISALVERASGRQWPGRRAWLAPVFTHEAGIHVDGLLKHRRNYEGLNPDELGRSHSLVLGKHSGAHMVRNSYRELGIELADWQSQALLGRIRAFSTRTKRSPQAAELEDFYRQLCEQGTAELAAGGMA

SEQ ID NO: 230 - protein, 385 aa, Azotobacter vinelandii
MASVIIDDTTLRDGEQSAGVAFNADEKIAIARALAELGVPELEIGIPSMGEEEREVMHAIAGLGLSSRLLAWCRLCDVDLAAARSTGVTMVDLSLPVSDLMLHHKLNRDRDWALREVARLVGEARMAGLEVCLGCEDASRADLEFVVQVGEVAQAAGARRLRFADTVGVMEPFGMLDRFRFLSRRLDMELEVHAHDDFGLATANTLAAVMGGATHINTTVNGLGERAGNAALEECVLALKNLHGIDTGIDTRGIPAISALVERASGRQVAWQKSVVGAGVFTHEAGIHVDGLLKHRRNYEGLNPDELGRSHSLVLGKHSGAHMVRNTYRDLGIELADWQSQALLGRIRAFSTRTKRRSPQPAELQDFYRQLCEQGNPELAAGGMA

SEQ ID NO: 231 - protein, 381 aa, Klebsiella pneumoniae
MERVLINDTTLRDGEQSPGVAFRTSEKVAIAEALYAAGITAMEVGTPAMGDEEIARIQLVRRQLPDATLMTWCRMNALEIRQSADLGIDWVDISIPASDKLRQYKLREPLAVLLERLAMFIHLAHTLGLKVCIGCEDASRASGQTLRAIAEVAQNAPAARLRYADTVGLLDPFTTAAQISALRDVWSGEIEMHAHNDLGMATANTLAAVSAGATSVNTTVLGLGERAGNAAAWKPSALGLERCLGVETGVHFSALPALCQRVAEAAQRAIDPQQPLVGELVFTHESGVHVAALLRDSESYQSIAPSLMGRSYRLVLGKHSGRQAVNGVFDQMGYHLNAAQINQLLPAIRRFAENWKRSPKDYELVAIYDELCGESALRARG

SEQ ID NO: 232 - protein, 515 aa, Herminiimonas arsenicoxydans
MAVDSNKLIIFDTTLRDGEQSPGASMTRDEKIRIARQLERLKVDIIEAGFAAASQGDFESIHAISGIIKDATVCSLSRANDKDIARAAEALKPAARKRIHTFLATSPLHMEKKLRMTPDQVFEQAKIAVRYARQFTDDVEFSPEDGSRSDMDFLCRVIEAVIKEGATTINFADTVGYAVPELYGNMLRTLRERIPNSDKAVWSVHCHNDLGMGVANSLAGVMIGGARQVECTINGLGERAGNTALEEIVMAVRTRKDYFNLEIGVDATQIVPTSKLVSQITGFAVQPNKSVVGANAFAHASGIHQDGVLKARDTYEIMRAEDVGWSANKIVLGKLSGRNAFKQRLEELGITMESAADTDAAFIRFKELADRKSEIFDEDIMALVSDEQHSHEHEYYNFVSLTQQSSSASKPVASVVFSMGGKEEICKGEGNGPVDAIVNAIESKVASGAELLLFSVNAITTGTESQGEVTMRLSKAGRIVNGVGADLDIVVASAKAYISALNKLHSKIEKLNPQL

SEQ ID NO: 233 - protein, 378 aa, Burkholderia vietnamiensis G4
MSIPIINDTTLRDGEQTAGVAFTVEEKCAIATALSNAGVPELEIGIPSMGADEIADIRSIVDLNLDASVMVWGRLTPGDLAAALRCRPDIIHLSVPVSDIHLQYKLRQPRAWVFAQIRRVIGEAVRSDLKISLGAEDASRADPAFLADVARLAQQCGAQRIRFADTLGVLDPFSTYEAVARLRDAIDIEIEMHAHNDLGLATANTLAALRAGATHANTTVNGLGERAGNAALEEVVMCSRHLLGRDTGVDTTALVGISRLVEHASGRQVALNKSIVGGGVFTHESGIHTDGLAKNPTTYESFDPAELGRARSLVLGKHSGSHGVRHAYEALGLPVADQLVPLLLARIRQHATQTKQAPNAADLYRFLVETRELIEEWS

SEQ ID NO: 234 - protein, 514 aa, Burkholderia vietnamiensis G4
MTDKLIIFDTTLRDGEQSPGASMTKEEKIRIAKHLERMKVDVIEAGFAASSNGDFDAIHTIAGLVKDSTICSLARANDKDIQRAADALKPASSARIHTFIATSPLHMEKKLRMTPDQVFEQARLAVRFARKFTDNVEFSPEDGSRSDLDFLCRVLEAVIAEGATTINIADTVGYGVPELYGNLVKTLRERIPNSDKAIFSVHCHNDLGMAVANSLAGVKIGGARQVECTINGLGERAGNTSLEEIVMAVKTRKDYFGLDVGIDTTQIVPTSKLVSQITGFVVQPNKAVVGANAFAHASGIHQDGVLKARDTYEIMRAEDVGWTANKIVLGKLSGRNAFKQRLQELGVSLDSEAELNAAFMRFKDLADRKAEIFDEDIIAIVSEESALAQEQEHVKFVSLSQHSETGEQPQAKVVFAVEGSEVTGEARGNGPVDATFNAIEGEVGSGSELLLYSVNAITTGTQAQGEVTVRLSKNGRIVNGVGTDPDIVAASAKAYIAALNKLHSKDDKLNPQRA

SEQ ID NO: 235 - protein, 518 aa, Buchnera aphidicola (Rhopalosiphum padi)
MNSQVIIFDTTLRDGEQALQASLSVKQKLQIALSLENTGIDIIEVGFPISSPGDFKSVQTISKNIKNSRICSLARCLDKDIDAAAEAMHSSNAFRIHIFLATSILHMESKLKKNFDQIIDMAITSVKRALRYTDDVEFSCEDASRTTMDNLCRIVEKLINAGVKTINIPDTVGYTVPNELSSIIHNLFQRVPNIDKSIISVHCHNDLGMAVGNSISAIQAGARQIEGTINGIGERAGNTALEEVIIAIKVREDVLGVSTKIKHKEIYRTSQIISQICNLPIPPNKAIVGSNAFAHSSGIHQDGVLKNRKNYEIMEPSSIGLKEVKLNLTSRSGRAAVKHYMTEMGYRECDYKIDELYASFLKLADKKGQVFDYDLEALAFINQQQEELEHFSLSFFSVQSISNGLSTASVKLLCGKKTFIESATTSNGPIDAIYQALNRITHFPIILQKYQLIAKGKGKDALGQVDILVEHKKRKFHGMGLATDIIESSAQAMVNVLNNIWKANQVNEKLKKLKKINN

SEQ ID NO: 236 - protein, 344 aa, Thermoplasma volcanium GSS1
MLTDDTLREGMQAPGIAFTLDEKIRIAQSISKSGIKRALVSYPSAHESEVEAARKITDLHLFDDTYSLGRSIKEDVDSIISTGSKVTLHLPFGDYDINKICDVVKYASDHSDSVEIAIVDMVKYEKEKIFDLAKKLWECGASIVQIPDTTGRATPKRVHDVVSYIKQNLKVKVEVHCHNDHGLAIANSIAGIEAGCDYVDTTIFGIGERNGIADTASIASYLEKAGYEDKINFEMLRKTYDLMSELILRKAGYRFFADNMPIFGRNVLSITAGTHSTSKVFPNSRVSLNVYAGSRLVASILRKNGIEPDERKVKLLVSKIKDLSSNEGRVVGEDEVLKIYGGIL

SEQ ID NO: 237 - protein, 259 aa, Poa annua
MGRGRVELKRIENKINRQVTFSKRRNGLLKKAYELSVLCDAEVALIIFSSRGKLYEFGSAGTTKTLERYQHCCYNAQDSNSALSETQSWYQEMSKLKAKFEALQRTQRHLLGEDLGPLSVKELQQLEKQLECSLSQARQRKTQLMVEQVEELRRKERQLGEINRQLKHKLDAEGSSSNNYRAMQQLTWAAGTVVDEGAAAYHMQHQQQQQPNHSAAMDCEPTLQIGYPHQFAAPEQAANNIPRSSGQGGENNFMLGWVL

SEQ ID NO: 238 - protein, 385 aa, Azotobacter vinelandii
MASVIIDDTTLRDGEQSAGVAFNADEKIAIARALAELGVPELEIGIPSMGEEEREVMHAIAGLGLSSRLLAWCRLCDVDLAAARSTGVTMVDLSLPVSDLMLHHKLNRDRDWALREVARLVGEARMAGLEVCLGCEDASRADLEFVVQVGEVAQAAGARPLRFADTVGVMEPFGMLDRFRFLSRRLDMELEVHAHDDFGLATANTLAAVMGGATHINTTVNGLGERAGNAALEECVLALKNLHGIDTGIDTRGIPAISALVERASGRQVAWQKSVVGAGVFTHEAGIHVDGLLKHRRNYEGLNPDELGRSHSLVLGKHSGAHMVRNTYRDLGIELADWQSQALLGRIRAFSTRTKRRSPQPAELQDFYRQLCEQGNPELAAGGMA

SEQ ID NO: 239 - protein, 361 aa, Pyrococcus abyssi GE5
MVLDSTLREGEQTPGVNYTPEQRLEIAIALDEVGVDFIEIGHPAVSEDVFRGMKLIAEQGLNVELLAHSRALIEDIDYVLKTGVDWVGIFFCLSEACLRKRFRITLDHALEKISRAIEYAKDHGLKVRFTPEDTTRTEWANLKRAIRLAKELKVDRISVADTTGSTHPLRFYTLVKKIVNFGIPVNVHCHNDLGLALANAIMGIEAGATLVDATVNGLGERAGIVDLAQIITVLYYHYGIKKYRLDLLYRVSNLVSEITGISPQPNYPIVGENAFTHKAGLHVSAVLKDPRFYEFLPAEVFGRERTIYVDRYAGKDTIRYYLEKFGIRDHGIVTSLLRKVKSSREPFTWEKLLEEARRVKE

SEQ ID NO: 240 - protein, 486 aa, Pyrococcus abyssi GE5
MRKVYIFDTTLRDGEQTPGVSLTVEEKVEIAKQLAKLNVDVIEAGFPIASEGEFKAVKKIATEVEDPTIAALARAVEKDIDRAGEALRNAEKNRIHTFIATSPIHMKYKLRKEPEEVKKLAVKAVEHATKYTEDVEFSAEDATRSDWDFLVEVYEAVIDAGATVINVPDTVGYATPEEFYELVRYLRRNISNIKGVQISVHCHDDLGLAVANSLSAIRAGADQVEVTVNGIGERAGNAALEEVIVALDVRRDFYKVKTDVNLKEIARTSKLVSHLTGIEVPPNKAIVGGNAFAHESGIHQDGVLKERTTYEIIDPKKLGFSGSKIVLGKHSGRHAFRKKLEELGYSLTEEHLERAFKKFKDIADRKRWITDTDIEAIIQEELTKSNGKLKVEIIHVTSGKVSTATVRISMNGEERIEVAWFKNGPIDALFSAINKALGEEFKLREYRVSSVTSGKDSLGEVLVRVEVNGEIFVGRGLSTDIIEASA

SEQ ID NO: 241 - protein, 239 aa, Arabidopsis thaliana
MGRGKIAIKRINNSTSRQVTFSKRRNGLLKKAKELAILCDAEVGVIIFSSTGRLYDFSSSSMKSVIERYSDAKGETSSENDPASEIQEMYIVTLEKYAYSEELVLDRQMMGEELSGLSVEALQNLENQLELSLRGVRMKKDQMLIEEIQVLNREGNLVHQENLDLHKKVNLMHQQNMELHEKVSEVEGVKIANKNSLLTNGLDMRDTSNEHVHLQLSQPQHDHETHSKAIQLNYFSFIA

SEQ ID NO: 242 - protein, 361 aa, Pyrococcus horikoshii OT3
MILDSTLREGEQTPGVNYSPEQRLRIALALDEIGVDFIEVGHPAVSKDVFIGIKLIASQDLNANLLAHSRALLEDIDYVIQADVEWVGIFFCLSNACLRKRFRMSLSQALERISKAIEYAKDHGLKVRFTPEDTTRTEWENLRRAIELAKELKVDRISVADTTGGTHPLRFYTLVKKVVNFGIPVNVHCHNDLGLALANAIMGIEGGATVVDATVNGLGERAGIVDLAQIVTVLYYHYGVKKYRLDKLYEISRMVSEITGIALQPNYPIVGENAFTHKAGLHVSAVLKDPRFYEFLPAEVFGRERTIYVDRFAGKDTIRYYLQKLGINDEEFVKVLLKRVKSSREPFTWDKFIEEVRRLKT

SEQ ID NO: 243 - protein, 525 aa, Bradyrhizobium sp. ORS278
MSNPVQSDKDRVVIFDTTLRDGEQCPGATMTFEEKLNIAAMLDDMGVDIIEAGFPIASDGDFEAVNEIAKRSKNAVICGLSRAGAKDIDRCAEAIRPAKRGRIHTFLSTSPVHMKYKLQMDPQQVFELVISSVTRARNHTDDVEWSSEDGTRTEFDFLCRCVEAAIKAGASTINIPDTVGYAVPEEYYDLFKRVRETVPNSDKAVFSVHCHNDLGMAVANSMAGVRAGARQIECTINGIGERAGNAALEEVVMAMRVRNDKLPFWNKIDTTQLTHASKVVSAATSFPVQYNKAIVGRNAFAHESGIHQDGMLKNAQTYEIMLPETVGVKQTSLVMGKHSGRHAFIHKLEEMGHKLSSNQVEDAFVRFKALADRKKQIYDEDIEALIDEGMVSAHDRIKLLSLSVIAGTRGPQRATMKLDIDGVTRIEESEGNGPVDAVFNCIKSLVPHEAKLELYQVHAVTEGTDAQAEVSVRLSQDGRSMTARAADPDTLVASAKAYLGALNKLVMKRQRDVAPGHGASAAAAS

SEQ ID NO: 244 - protein, 284 aa, Vitis vinifera
  misc_feature (68)..(68): Xaa can be any naturally occurring amino acid
  misc_feature (83)..(83): Xaa can be any naturally occurring amino acid
  misc_feature (110)..(110): Xaa can be any naturally occurring amino acid
  unsure (1)..(284): unsure at all Xaa locations
MVDKDDDLGLSLALKCPEALPQRPLNLFVQKKALCSDAFHASGTILLSLSLCVFVCFFLLEMRFFGVXELRSECIDVNRAPTXADCEDVGVSSPNSTISSISGKRNDREXNEEENENENEIESSEEDAGGTGDTVRKKLRLSKEQSAILEETFKEHNTLNPKQKLALAKQLNLRPRQVEVWFQNRRARTKLKQTEVDCEYLKRCCENLTEENRRLQKEVQELRTLKLSPQLYMHMNPPTTLTMCPSCERVAVAPSFPIGPASTSAHAHSRAESLEATSKYVGKK

SEQ ID NO: 245 - protein, 496 aa, Vitis vinifera
MDAVVLTGLEESGVRVRVVNFIQGGREMAFLLESVQEEDLGRNIIGSTWSTWGRKDNRYPSLKGDKEFPFCGMWDWENLDIFNAKSTEIPKKLQSDWEIEGEGGIDTGSFYSSGCGAGSGGSGSDLGHAYSSKSSKSASIDSSSKVGIKTSNFTFEAFQDFSQDFNKKRDLERAEPTGSSPNLEASIGSGEPLIGLKLGKRTYFEDVSAGGNAKGSVFSVIPISSDTTAKRSRLSCQNAHVSRCQVEGCNLDLSTAKDYHRKHRVCESHTKCPKVIVGGLERRFCQQCSRFHSLSEFDEKKRSCRRRLSDHNARRRKPQPEGIQSNSARLSSFYGGKQQMSLVLSSVPIVHTRPAVNPSWEGTCSKFTQTKGLVRPGNTGGIDRQLHLPGSELQNGISTLCHDSSRLLHSKGAIAEVLNQVSQGMLHSTSEHWRTELPSTDSRVHILPSQGDGNTHFQEFKLFKAPYESGFSSGYSEYRELRYPIPRSNARVMKQT

SEQ ID NO: 246 - protein, 636 aa, Vitis vinifera
  misc_feature (13)..(13): Xaa can be any naturally occurring amino acid
  misc_feature (33)..(33): Xaa can be any naturally occurring amino acid
  misc_feature (412)..(412): Xaa can be any naturally occurring amino acid
  misc_feature (434)..(434): Xaa can be any naturally occurring amino acid
  misc_feature (441)..(441): Xaa can be any naturally occurring amino acid
  unsure (1)..(636): unsure at all Xaa locations
MGLGFKMKWTSHXCFRLIGIAVKEGISMLLKSXCVCMFPFPRFNWDFYPPNSVCEISLEKFLFSLSASFGFRSIHGCPLGLAAQGTRDLICLRQHQKDFLPTVFVAAKQEELRQTLQFQALSLKWNLRTPSEWDWETLTAFNTKAFEFPGRVQLSNHDIEVDGGVDNGSVYSSGGGGFSGSDLGHGSSSRSSISVSGDSSLKEGIKKFRNVEDFHKDFSENKELIRVGSSGNCPTVGTSDGSGEAMIGLKLGKRTYFEDVCAASTAKTTTSSVNPASSVSATKRFRTSYQSSQTPRCQVEGCNLDLKSAKDYHRRHRICENHSKSPKVIVAGLERRFHELTEFDDKKRSCRRRLNDHNARRRRPHPETIQFSSGRLPSSLYDGRQQINLACNRLPIPVATPMWQNPCSFKDXQTGGSLIRPVKAVGIDKQLHMXTDEMPDXISMLHVNSERMLSFDGSTPRVLNQDVWIGEQRILEVQAGGIVVFWDKQVFELLEMEGSLEGSPWCIGDDFNVVRFPTERRGYLRMSVSMRCFLELIDELGIKDLTLYGGEHTWCGGLNNSLASRLDRFLVSDDWEDRFGGLVQKILPNPSFDHAPILMDGGGIRNGKNPFRFENMWLKAEGFKDLIRCWWEGYSV

SEQ ID NO: 247 - protein, 540 aa, Synechococcus sp. WH 7803
MAHDPGRVLIFDTTLRDGEQSPGASLNLEEKLAIAQQLARLGVDVIEAGFPFASPGDFNAVQRIAQQVGGEQGPIICGLARASRGDIKACADAVAPAPRRRIHTFIATSDIHLEHKLRKSRQEVLAIVPEMVAYARSLVDDVEFSCEDAGRSDPEFLYAVIEAAINAGASTINIPDTVGYTTPAEFGALIAGIDQHVPNISEAVLSVHGHNDLGLAVANFLEAVKNGARQLECTINGIGERAGNAALEELVMALHVRRRYFNPFFGRAEDSPTPLTGVRTEEITKTSRLVSNLTGMVVQPNKAIVGANAFAHESGIHQDGVLKNRLTYEIVDARTVGLTDNRISLGKLSGRSAVRARLEELGYDLSREDLDDAFARFKELADRKRDITDRDLEAIVSEQVQQPDARYQLKLVQVSCGSSLQPTATVTLLDEEGQEQSEAAIGTGPVDAVCRALNALAGEPNELVEFSVKSVTEGIDAMGEVTIRLRRDGQLFSGHAADTDVVVAAAQAFVNALNRLVAGSLNPTLHPQRDATPLDASPTL

SEQ ID NO: 248 - protein, 523 aa, Bradyrhizobium sp. BTAi1
MSSTTPSDKDRVVIFDTTLRDGEQCPGATMTFEEKLNIAAMLDGMGVDVIEAGFPIASDGDFEAVNEIAKRTQNAVVCGLSRAGAKDIDRCAEAIRPAKRGRIHTFLSTSPVHMKYKLQMEPQAVFELVVSSVTRARNHTDDVEWSSEDGTRTEFDFLCRCVEAAIKAGATTINIPDTVGYAVPEEYYDLFKRVRETVPNSDKAVFSVHCHNDLGMAVANSMAGIRAGARQIECTINGIGERAGNAALEEVVMAMRVRNDKLPFWNKIDTTQLTHASKVVSAATSFPVQYNKAIVGRNAFAHESGIHQDGMLKNAQTYEIMLPETVGVKQTSLVMGKHSGRHAFIHKLEEMGHKLAGNQVEDAFVRFKALADRKKHIYDEDIEALIDEGMVSAHDRIKLLSLSVIAGTRGPQRATMKLDVDGVTKIEESEGNGPVDAVFNCIKSLVPHEAKLELYQVHAVTEGTDAQAEVSVRLSQDGRSMTARAADPDTLVASAKAYLGALNKLVMKRQRDVAQGAAAAAAS

SEQ ID NO: 249 - protein, 150 aa, Oryza sativa Indica Group
MPLLPAAKRSEVVAAEEERAGLRGGGGSDEEDGGCGIDGSRKKLRLSKDQSAVLEDSFREHPTLNPRQKATLAQQLGLRPRQVEVWFQNRRARTKLKQTEVDCEFLKRCCETLTEENRRLQKEVQELRALKLVSPHLYMNMSPPTTLTMC

SEQ ID NO: 250 - protein, 222 aa, Prunus persica
MGGGKIEIKRIENTTNRQVTFCKRRNGLLKKAYELSILCDAEVALIVFSSRGRLYEYSNNNSIRNTIERYKKACSDSSGSTSITEINAQYYQQESAKLRQQIQMLQNSNRHLMGDALSTLSVKELKQLENRLERGINRIRSKKHEMLLAEIEYLQKKEIELENENVCLRTKISEVERLQQANMVGPELNAIQALASRNFFSQNMMEGGATYPQQDKKILHLG

SEQ ID NO: 251 - protein, 381 aa, Klebsiella pneumoniae
MERVLINDTTLRDGEQSPGVAFRTSEKVAIAEALYAAGITAMEVGTPAMGDEEIARIQLVRRQLPDATLMTWCRMNALEIRQSADLGIDWVDISIPASDKLPQYKLREPLAVLLERLAMFIHLAHTLGLKVCIGCEDASRASGQTLRAIAEVAQNAPAARLRYADTVGLLDPFTTAAQISALRDVWSGEIEMHAHNDLGMATANTLAAVSAGATSVNTTVLGLGERAGNAAAWKPSALGLERCLGVETGVHFSALPALCQRVAEAAQRAIDPQQPLVGELVFTHESGVHVAALLRDSESYQSIAPSLMGRSYRLVLGKHSGRQAVNGVFDQMGYHLNAAQINQLLPAIRRFAENWKRSPKDYQLVAIYDELCGESALRARA

SEQ ID NO: 252 - protein, 420 aa, unidentified eubacterium SCB49
MGIVKHRKPGFSKKYHLINLFENTKLNLKMSNNYIQIFDTTLRDGEQVPGCKLDTKQKVIIAEQLDLLGVNVIEAGFPVSSPGDFNAVKAVSRVVKNATVCALSRSVKNDIKTAAESLEGAKYPRIHTGIGTSESHIKYKFKTTQEDILERAFEAVKYAKTFVEDIEFYAEDAGRTNNEYLARVCEAAIKAGATVLNIPDTTGYCLPSEYGSKIKYLKEHVKGIDNVILSCHCHNDLGLATANAIEGIINGAKQVECTINGIGERAGNTALEEVVMVLKQHPYLNIETQIDTTRLYGISQLVSESMGVYTQPNKAIVGVNAFAHSSGIHQDGIIKNRETYEIINPKDVGVIESSIVLTARSGRAALAYRAKNVGYNLTKLQLDNVYENFLHFADKKKEVNNNDIHQIIETSKVYQEIKTN

SEQ ID NO: 253 - protein, 521 aa, Moritella sp. PE36
MSDQVIIFDTTLRDGEQALSASLTVKEKLQIAFALERLGVDVMEVGFPISSPGDFESVQTIARNIKNSRVCALSRALEKDIDAAAQALSVAKDFRIHTFISTSDIHVKSKLKRSFDDVLNMGRHAIKHARRYTDDVEFSCEDAGRTPIDNLCRMVEEAIKAGATTINIPDTVGYTVPSQFGGIITDLFNRVPNIDKAVISVHCHDDLGLSVANSIAAIQQGARQIECTINGIGERAGNCSLEEIAMILHTRQDLLGKTTNINAQEIYRTSQLVSQLCNMPVQANKAIVGANAFSHSSGIHQDGVLKAKNTYEIITPESIGLTQNKLNLTSRSGRHVIKHRMAELGYTDNDYNLEELYESFLQLADKKGQVFDYDLEALIFFNNLHEDEAHFKLDYLSVQSGSGVKATATISLISQLETTGESRTDTEAAIGNGPVDAVYKCLSRISGFDIDIADYHITAKGEGKDALGQVDIVATYEGRKFHGIGLATDIIESSALAYIHVMNNIHRANAVEQQKLKKQNQ

SEQ ID NO: 254 - protein, 387 aa, Moritella sp. PE36
MKKISILDTTLRDGEQAPENAMDPEKKLKMALMLEECGVDHIETGFPASSKFDYEATKLISKEVTQSGIATFSRTLTSDVQLSLESGGREKNHTIQMVATGSDLHLKNKRNISRSQAIEEVINTVKFAKQNSDCRIAVGIEDASRADFDFMGEITEAAVFAGAHQIILADTTGYATPSEFKKLIQFIRSKTGDGISISTHCHNDLGLAHANTLAGIEGGADEVQVTLGGIGERAGNASLEMIASTLFFKPECYSSFTDIKLDKLYKVYQELCSEIGLDIPRNQPVFGTYAFSTAAGIHQQGVLANPDTYEFVKPDVFNREREFFVSRHSGKSIIKYILSNKAMDQDPKLLETLYANCISSRAENSCLSMIELEFEIDKFMKTFCKVA

SEQ ID NO: 255 - protein, 512 aa, Moritella sp. PE36
MEIMRPQVQLMDTTLRDGEQTQGVSFTPDEKVSIAKALLQSLNVDRIEVASARVSLGEKQAVSSLMQWAEQEQVADRIEILGFVDHTKSVDWITSSGAKVINLLTKGSEKHCTEQLRKTPSQHIADVRETIYYAIEQGLSVNIYLEDWSNGYSDNPEYVYNMVSELSDLPIQHYMLPDTLGIMSPDEVHTSLSDMIRRFPQLKFDFHPHNDYGLATANALTAAKVGISAIHCTVNCLGERAGNASLAEVAVVLKDKLGIESSINEQRIHQISQMIENFSGKITSANAPIIGADVFTQTSGIHADGDNKGGLYQTVLGPERFERTRTYALGKMSGKASLEKNLEDLNIDLSAEQKTKLLQRIVTLGDQKSTITPEDLPFIIADLLESKDYSHIELLDCSITSGLNVDSTASIRARIGDEMYKSAGSGNGGFDAFSMAIQAIMQKVGFDYPSLENYQVRIPPGGKTSALTESFITWQQDNKTFRTRGVSSNQVFAGVQATMRMLNKLLHEKITA

SEQ ID NO: 256 - protein, 380 aa, Alkaliphilus metalliredigens QYMF
MTKKIKLLDTTLRDGEQTAGVVFANEEKVFIAKMLDELGVDQIEAGIPVMGSDEKDVIKKIVKSNLKASIMGWNRAVIKDIEASIDCGVDAVAISISTSDIHITHKLNSTRDRVLEQMVKATEFAKFNGLYISVNAEDASRTDDLFLIDFFKAAKEAGANRVRFCDTVGILDPITTYNRIKLLKEAVDIDIEMHTHNDLGMATANAIAGAMAGATYLGATVNGLGERAGNASLEEVILSLKYAMNLEHANYHIEKIKDLCAYVAKASNREIPFWKAITGERIFYHESGIHADGALKNPLTYEIIKPEDLGLERKILIGKHSGSAAIKNRLSFHGIHIDDASSYELLIKVRNVSIALKRSLNDKELLSLYEEVLRERNLTA

SEQ ID NO: 257 - protein, 513 aa, Alkaliphilus metalliredigens QYMF
METTRQIKIFDTTLRDGEQSPGCSMNLGEKLEVAMQLEKMKVDVIEAGFAIASPGDFNAVKEIAKIVKNATVASLARALPKDIDRAYEAVKYAENPRIHTFIATSDIHMKYKLKSTEEEVLAQAVAMVKRAKGYCNDVEFSAEDASRSRTEFLYRIFEAVIKAGATVINVPDTVGYTTPDEYYRLIKGIKENVANIHRAEISVHCHNDLGMAVANTLAAAAAGATQLECTINGIGERAGNAALEEIVMGINTRKDLYGMYTNIDTGQIYAASRLTSKVTGMKVQHNKAIVGENAFAHESGIHQHGMLANKSTYEIMTPESIGLSKNQLVLGKHSGSHALEDRLKELGYEISKEKLNEVFKEFKILADRKKVIYDRDLEALVQDQKQNFEEIYQLKEFVINCGNIITSTANIKLIKDGKELEEVAKGFGPIDAAFKAIDNIVGGDFKLEDYSVESVTEGEDALGEAVVKIKRNNEIYNGRGLSTDVVEASIKAYINAINKMMSENIPQGQQAAM

SEQ ID NO: 258 - protein, 379 aa, Alkaliphilus metalliredigens QYMF
MRDFYIVDTTLRDGEQTPGVVFLKKEKIKIARMLDELGVDYIEAGIPIMGEEEKDVIREIIAMNGKAKILTWNRMKKMDVDASLACGAKYIHIAVPASDIHIFQKLRKDRKWVIQQVQEVVSYGAEKGCIVSVGAEDASRAEEKFLIEIYQAAIKEGAVRLRYADTLGILTPITTYQAIKRICDYIDADLEFHGHNDFGMATANSLSAFQAGAKYIDCSVNGLGERAGNTALEEIVMTLKYLLKSNHPFEIKRILELSNIVQEASRKIVGESKPIVGKSVFSHESGIHVDGLLKNPTVYESFSPGEIGRKRKIVLGKHSGRTTVIYRLQEMGIKVTPKEANEIIEMIHKKYTYDKNPNIDHMLQQWVELKRDTYDAFSS

SEQ ID NO: 259 - protein, 218 aa, Ipomoea batatas
MGRGKVEIRRIEKSTNRRVTFWKRRNGLLKKAMEMGILCDAEVGLMIFSSTGKLHEFATTSIRSVIERYNKTQGDSLQSPLDPTLELKFWQIEVAILRQQLHNMQEDHRKVMGEVYGLSVKDLQNLENQLEMSLSGIRMKKEQILIEQIQELTHKQGSFVHQENFELFNKFQAYGTSDPNAVNGDTISPYDFTISEESQGHIHFQLPQNFSDLARALY

SEQ ID NO: 260 - protein, 228 aa, Arabidopsis thaliana
MGRGKIVIQRIDDSTSRQVTFSKRRKGLIKKAKELAILCDAEVGLIIFSSTGKLYDFASSSMKSVIDRYNKSKIEQQQLLNPASEVKFWQREAAVLRQELHALQENHRQMMGEQLNGLSVNELNSLENQIEISLRGIRMRKEQLLTQEIQELSQKRNLIHQENLDLSRKVQRIHQENVELYKKAYMANTNGFTHREVAVADDESHTQIRLQLSQPEHSDYDTPPRANE

SEQ ID NO: 261 - protein, 523 aa, Klebsiella pneumoniae subsp. pneumoniae MGH 78578
MSQQVIIFDTTLRDGEQALQASLSVKEKLQIALALERMGVDVMEVGFPVSSPGDFESVQTIARTIKNSRVCALARCVEKDIDVAAESLKVAEAFRIHTFIATSPMHIATKLRSTLDEVIERAIYMVKRARNYTDDVEFSCEDAGRTPIADLARVVEAAINAGATTINIPDTVGYTMPFEYANIISGLYDRVPNIDKAIISVHTHDDLGIAVGNALAAVHAGARQVEGAMNGIGERAGNCALEEVIMAIKVRKDIMNVHTNINHHEIWRTSQTVSQICNMPIPANKAIVGTGAFAHSSGIHQDGVLKNRENYEIMTPESIGLNQVQLNLTSRSGRAAVKHRMEEMGYQESDYNLDHLYDAFLKLADKKGQVFDYDLEALAFINKQQEEPEHFRLDYFNVQSGSSDIATASIKLVCGDEIKTEAANGNGPVDAIYQAINRVTDYNIELVKYGLSAKGHGKDALGQVDIVVDYNGRRFHGVGLATDIVESSAKAMVHVLNNIWRAAEVEKELQRKAQNKENNKETV

SEQ ID NO: 262 - protein, 415 aa, Xanthobacter autotrophicus Py2
MLAKSPSAILARSSRASVDASGAATGTVPARTAFLNDTTLRDGEQAPGVAFTRREKIEIAEALAAAGVPEIEAGTPAMGDEEIETLRSIVSLKLPLRVAAWCRMSEEDLFAAVSAGVTYVNLSIPTSDRQLKGKLNRDRDWALGALRHVVTLATKLGFTAAVGCEDASRADPDFLCKVAEVAKEAGAFRLRLADTLGVLDPFSAYALVRRVANATDLEIEFHAHDDLGLATANTLAAVTGGARHASVTVAGLGERAGNAALEEVAIALRQTARSETGIDPHALRPLAQKVMEAAGRPMPRTKAIVGEDIFTHESGIHVSGLLKDRGTYEALSPEMLGRSHRVVLGKHSGLAAILKALSDQGLAVDEARGRAILARVRDFAIRSKNSVSPDVLRRFYEDSFTEEALKRRHAAVMGA

SEQ ID NO: 263 - protein, 527 aa, Xanthobacter autotrophicus Py2
MTDTSSAPVSGKPVSDRDRVVIFDTTLRDGEQCPGASMTFEEKLEVAALLDEMGVDVIEAGFPIASIGDFESVAEIARRTQNATVAGLSRAALNDIDRCAEAVKHARRGRIHTFLSTSPVHMKYKLQKQPHEVLEMVVASVTRARNHVEDVEWSSEDGTRTEIDFLCRCVEAAIKAGATTINIPDTVGYTTPAEYEALFRTVIERVPNSDKAIFSVHCHDDLGMAVANSLAGLAGGARQIECTVNGIGERAGNAALEEVVMAIETRSDVLPYRSGINTKMLTRASKLVSAVTSFPVQYNKAIVGRNAFAHESGIHQDGMLKHTQTYEIMTPESVGVSKTSLVMGKHSGRAAFRDKLKTMGYELGENALNDAFTRFKDLADRKKVVYDEDIEALVDQGIAAAYDRIKLISLSVIAGTRGPQRATMRLEVDGQVKTEEAEGNGPVDATFNAIKALVPHQVKLDLYQVHAVTEGTDAQAEVSVRLEENGKAVTARAADPDTLVASAQAYITALNKLHMKRQTMNPQSAVG

SEQ ID NO: 264 - protein, 240 aa, Bambusa oldhamii
MGRGRVELKRIENKINRQVTFSKRRNGLLKKAYELSVLCDVEVALIVFSSRGKLYEFGSAGTSKTLERYQRCCYSSQDGTVADREMQSWYQEVSKLKAKFESLQRSQRHLLGEDLGPLSIKELQQLEGQLESSLSQARQRKTQIMLDQMEELRKKERRLGEINKQLKTKLEQEGANLGAIQSSWEAEAAVGNSYQIHLGQSSAMDCEPTLQIGYHQFVQPEAGLPRNTGGENNFMLGWVL

SEQ ID NO: 265 - protein, 455 aa, Pseudomonas aeruginosa PAO1
MIRVIDCTLREGCQARQCSFDSAQSVQLAREIAALGVDMIECGHPRISADERERVRAVVAAVSTPVLAHARARREDIDAVLETGAQWVGLFASINAISLETKFKGMNREEVLELFHDAIRYARERGLRVRATVEDAARTSVSDLVSMIATARDAGADRICFADSVGILLPDETFDVLSLLRHEFPDVVFEYHVHNDRGLALGNTLAAIQAGVQWHSASCNGIGERAGITDTFQLLTLLHTKFAADRFNLKNVLAVSELVEAHSRIKRSPMHPVVGENAFVHVARLHQLAMQENQDAYSAFDPELINGRVSLQRYTPMHRQSLFLTPFEKSASELKYHRHGPGKRFVMLDRRLLDGSPFYFIARQFHDVGDGGPGHVDSHVHNCDSVFLFLGSDEDYRGLEVEVLLGGQLRRLQSPASVFIPAGVEHSYRYLGGSGTYINFVHKGDYHESLLEITQ

SEQ ID NO: 266 - protein, 518 aa, Pasteurella multocida subsp. multocida str. Pm70
MADNIIIFDTTLRDGEQALKASLTVKEKLQIAFALERLGVDVMEVGFPISSAGDFESVQTIARHIKHSRVCALSRAVDKDIDAAAEALKVAEAFRIHTFIATSALHVEAKLRRTFEDVVDMAINAVKRARNYTDDVEFSCEDAGRTGVDNICRIVEAAIKAGATTVNIPDTVGYCLPYQYGDIIANVMNRVPNIDKAIISVHCHNDLGMATANSLTAVQNGARQIECTINGIGERAGNTALEEVVMAIKTRQDMFNGLDTRINTQEIHRVSQMVSQLCNMPIQPNKAIVGSNAFAHSSGIHQDGMVKHKNTYEIMSPESIGLKKEKLNLTARSGRAAVKNHMSEMGYQESDYDLDKLYEAFLKLADKKGQVFDYDLEALAFIDMQQGDEDRLTLDVITSQCISHLPASAFVQVELDGKKMSQVSNGGNGPVDAVYNAILAITGLEMKMLNYNLTAKGEGAEALGQVDIVVEHEGRRFHGVGLATDIVESSARALIHAINAIYRSQKVADLKLHKIAGV

SEQ ID NO: 267 - protein, 524 aa, Aquifex aeolicus VF5
MEAKMGEKVYIFDTTLRDGEQAPGFSMTTEEKLQMAHQLAKLNVDIIEAGFAAASKGDFEAVNRIAKEVKGPVICSLARALESDIEIAAKALEPAERKRIHTFIATSPIHMEYKLRMTPDQVLERIKKAVSFARNFTDDVEFSCEDATRSEREFLYRAIETAIKHGATVINIPDTVGYAIPEEFGQLIEDIMNNVPNIDKVILSVHCHDDLGLATANSLTAVKHGARQVECTINGIGERAGNAALEEVVMALKVRKDFFGDLYTDVNTKEIYKTSRLLCRITGNFVQPNKAIVGDNAFAHESGIHQHGVLSHRMTYEIMNPEDVGFPMSRIVLGKHSGRHALKRRLEELGFKFTKEELDRIFEKFKELADRKKEVYDEDLEALIYQEFMKIEDHEPVKVLHFQVQSGDNMIPTATVKLEFKGEEREASSTGNGPVDATIKAIQKALGIEPKLLDYSIKALTPNTDAQAEARVVLELDGVKASGRGVDTDIIKASVKAFTDALNRAIVRKEYIIQRQEIREEGTV

SEQ ID NO: 268 - protein, 515 aa, Bacillus halodurans C-125
MRKISVFDTTLRDGEQSAGVNLNFEEKMEIAKQLERLGVDIIEAGFPASSQGDFQSVKAIAETVKGSSVTGLARSVQKDIDAAWEALKSAEEPRIHLFIATSPIHMEHKLRMTPEQVIEKAVESVKYAASRFKHVQWSAEDASRSDFPFLAQIIEAVIQAGATVINLPDTVGYTTPQEIKRMFQYMKQNVPSIDKVSLSTHNHDDLGMAVANSLAAIQGGADQVECTINGIGERAGNASLEEIAVALNIRKDHYETETGLILKEIKRTSSLVSKLTGMVVPNNKAVVGANAFAHESGIHQDGVLKNKQTYEIITPEMVGVSSNSMVLGKHSGRHAFKTKVQELGFTGTDEQLNNIFKAFKDLADKKKEITEDDLFALMTEQTVGGETNHYELQTLQVNYGSNLTNTATITMKLPSGEVAEEAATGSGSVEAIYNTLERLLDAPVKLLDYRIQSITGGRDALADVYVQMDYQGVVSSGRGTAHDVLEASAKAYLNAVNRTINRKKYAEVYGSKVEV

SEQ ID NO: 269 - protein, 516 aa, Vibrio cholerae O1 biovar eltor str. N16961
MNNQVIIFDTTLRDGEQALSASLTVKEKLQIAYALERLGVDIIEAGFPVSSPGDFESVQTIAKNIKNSRVCALSRAVAKDIDAAAEALKVAEAFRIHTFISTSTIHVQDKLRRSYDDVVAMAVKAVKHARQYTDDVEFSCEDAGRTPIDNLCRMVEAAINAGARTINIPDTVGYTVPSEFGGIIQTLFNRVPNIDKAIISVHCHDDLGMSVANSIAAIQAGARQVEGTINGIGERAGNCALEEIAMIIKTRQELLGVTTGIKHDEISRTSKLVSQLCNMPIQSNKAIVGANAFSHSSGIHQDGMLKNKNTYEIMTPESIGLKNQALNLTSRSGRAAVKSHMDSMGYNENEYNLDALYEDFLKLADRKGQVFDYDLEALMHFSNLREEDDFYKLNYLSVQSGSVMATTSIKLLCGGEEKCEAAVGNGPVDALYQCIYRITGYEIVLDKFDLTAKGEGEDGLGQADIIANYKGRKYHGTGVSTDIVEASGQALLHVINSIHRADQIAQIKQKKSVATV

SEQ ID NO: 270 - protein, 513 aa, Thermotoga maritima MSB8
MRRIKIFDTTLRDGEQSPGASMSIEEKVEMALMLEDLGVDLIEAGFPVSSPVQFEAVKRVASAVQKPIVVGLARCVEKDIDAAYEALKDRPKDKRMIHVFIATSPIHRKYKLRMEKEEILERIRRYVGYAKQFFDLVEFSAEDASRTEVPFLIEAYKTAIEAGATTINVPDTVGYALPDEFGELIKTLREGVPGIENVDLSVHCHNDLGLAVANSLAAVQNGATQVEVTLNGIGERAGNCALEEFVMILKVRKDKLPYETGIKTELIYPASRLLTHITGLIPSRNKPIVGENVFLHESGIHQDGVLKHRETYEIMKPSDIGRSSETLVLGRHSGKHALRKKLETYGIKLDEETFQKVFEKFTELADRKKEVYDDDLFSIVSEVLREPINGYKLVHFHVHTGNTLLPTAAVVLQVGNEKREAAEAGNGPVDAIFKAIDKALGIQPKLEEYIIQAVGTGKNAQGEVKLTLRIDNELYSGRGVSTDIVEASAIAYINAINKYLIAKGLLRKNGGAE

SEQ ID NO: 271 - protein, 406 aa, Methanocaldococcus jannaschii DSM 2661
MTKVLVMFMDFLFENSWKAVCPYNPKLDLKDIYIYDTTLRDGEQTPGVCFTKEQKLEIARKLDELGLKQIEAGFPIVSEREADIVKTIANEGLNADILALCRALKKDIDKAIECDVDGIITFIATSPLHLKYKFNNKSLDEILEMGVEAVEYAKEHGLFVAFSAEDATRTPIEDLIKVHKAAEEAGADRVHIADTTGCATPQSMEFICKTLKENLKKAHIGVHCHNDFGFAVINSIYGLIGGAKAVSTTVNGIGERAGNAALEELIMALTVLYDVDLGLNLEVLPELCRMVEEYSGIKMPKNKPIVGELVFAHESGIHVDAVIENPLTYEPFLPEKIGLKRNILLGKHSGCRAVAYKLKLMGIDYDREMLCEIVKKVKEIREEGKFITDEVFKEIVEEVLRKRNKN

SEQ ID NO: 272 - protein, 518 aa, Methanocaldococcus jannaschii DSM 2661
MIIYREENEIIKKALENLNIPDRVYIFDTTLRDGEQTPGVSLTPEEKIDIAIKLDDLGVDVIEAGFPVSSLGEQEAIKKICSLNLDAEICGLARAVKKDIDVAIDCGVDRIHTFIATSPLHRKYKLKKSKEEIIDIAVDAIEYIKEHGIRVEFSAEDATRTEIDYLIEVYKKAVDAGADIINVPDTVGVMIPRAMYYLINELKKEIKVPISVHCHNDFGLAVANSLAAVEAGAEQVHCTINGLGERGGNAALEEVVMSLMSIYGVKTNIKTQKLYEISQLVSKYTEIKVQPNKAIVGENAFAHESGIHAHGVLAHALTYEPIPPELVGQKRKIILGKHTGTHAIEAKLKELGIEVGKDINKDQFDEIVKRIKALGDKGKRVTDRDVEAIVEDVVGKLAKKDRVVELEQIAVMTGNRVIPTASVALKIEEEIKKSSAIGVGPVDAAVKAIQKAIGEKIKLKEYHINAITGGTDALAEVIVTLEGYGREITTKAASEDIVRASVEAVIDGINKILAKREK

SEQ ID NO: 273 - protein, 491 aa, Methanocaldococcus jannaschii DSM 2661
MMVRIFDTTLRDGEQTPGVSLTPNDKLEIAKKLDELGVDVIEAGSAITSKGEREGIKLITKEGLNAEICSFVRALPVDIDAALECDVDSVHLVVPTSPIHMKYKLRKTEDEVLETALKAVEYAKEHGLIVELSAEDATRSDVNFLIKLFNEGEKVGADRVCVCDTVGVLTPQKSQELFKKITENVNLPVSVHCHNDFGMATANTCSAVLGGAVQCHVTVNGIGERAGNASLEEVVAALKILYGYDTKIKMEKLYEVSRIVSRLMKLPVPPNKAIVGDNAFAHEAGIHVDGLIKNTETYEPIKPEMVGNRRRIILGKHSGRKALKYKLDLMGINVSDEQLNKIYERVKEFGDLGKYISDADLLAIVREVTGKLVEEKIKLDELTVVSGNKITPIASVKLHYKGEDITLIETAYGVGPVDAAINAVRKAISGVADIKLVEYRVEAIGGGTDALIEVVVKLRKGTEIVEVRKSDADIIRASVDAVMEGINMLLN

SEQ ID NO: 274 - protein, 517 aa, Neisseria meningitidis MC58
MTQTNRVIIFDTTLRDGEQSPGAAMTKEEKIRVARQLEKLGVDIIEAGFAAASPGDFEAVNAIAKTITKSTVCSLSRAIERDIRQAGEAVAPAPKKRIHTFIATSPIHMEYKLKMKPKQVIEAAVKAVKIAREYTDDVEFSCEDALRSEIDFLAEICGAVIEAGATTINIPDTVGYSIPYKTEEFFRELIAKTPNGGKVVWSAHCHNDLGLAVANSLAALKGGARQVECTVNGLGERAGNASVEEIVMALKVRHDLFGLETGIDTTQIVPSSKLVSTITGYPVQPNKAIVGANAFSHESGIHQDGVLKHRETYEIMSAESVGWATNRLSLGKLSGRNAFKTKLADLGIELESEEALNAAFARFKELADKKREIFDEDLHALVSDEMGSMNAESYKFISQKISTETGEEPRADIVFSIKGEEKRASATGSGPVDAIFKAIESVAQSGAALQIYSVNAVTQGTESQGETSVRLARGNRVVNGQGADTDVLVATAKAYLSALSKLEFSAAKPKAQGSGTI

SEQ ID NO: 275 - protein, 496 aa, Methanothermobacter thermautotrophicus str. Delta H
MQVRVLDTTLRDGEQTPGVSLTPEEKLRIALKIDALGADIIEAGSAITSEGEREGIRKITSEGLRAEICSFARAVREDIDAAISCDVDSVHLVVPTSDLHLEHKLRKTREEVLEQAVDCTEYAVDHGILVELSAEDSTRSDMDFLRTIFREGIEAGAERICACDTVGILTPERSYEFYRGLSELGAPLSVHCHNDFGLAVANSLAGLRAGASEVHATINGIGERAGNAALEEVVVALKSLYDVDTSINIEMLYETSRMVARMTGVYLQPNKAIVGENAFAHESGIHADGVLKKAETYEPITPEMVGHGRGFVMGKHIGTHALRKRLDELGMKVADDKLMEIFRRVKTLGDMGKCVTDVDLQAIAEDVLGVMEDKVVDLQEVTIVSGNRVTPTASVKLRVDDREVLEAGTGVGPVDAAIVAIKKSLEDFADITLEEYHVDAITGGTDALIDVVIKLRHGDRIISARSTQPDIIMASVEAFLSGVNRLLANEKSEGTH

SEQ ID NO: 276 - protein, 505 aa, Methanothermobacter thermautotrophicus str. Delta H
MYIEEVKGEMNLPENVRIFDTTLRDGEQTPGVALTVEEKTGIARKLDALGVDTIEAGFPAASPGEMNSIRRIVELGLEANICGLARVLREDIDAAIDCGVDYIHTFIGTSPLHREYKLKMSPDEIIDRAVFGVEYAAEHGLKVEFSAEDATRTEFDYLVEVYRAAEDAGAEIINVPDTVGVMIPRAMNHLVSRLKEELRVPISVHCHNDFGLAVANSLAAVEAGASQVHATVNGLGERAGNAALEEVVMALITRYDLPVDIRTVELVNISEFVSKITGVRMPPNKAIVGENAFAHEAGIHVHGVLEKAETYEPITPEMVGHKRRIVLGKHTGANALRSKLQEYGIEMKEEQFCTLYEQVKRLGDKGKRITDADLRAMAVTILGKASREIVKLEGIAVMTGESVMPTATVKLRIGDEVKTTSMTGVGPVDAAINAIQSLVSETADIELDEYNIEAITGGTNALAEVFVVMSDGEGNKATGRSTREDIVMASVEAVLDAINKILSLK

SEQ ID NO: 277 - protein, 391 aa, Methanothermobacter thermautotrophicus str. Delta H
MRYFVSPFNKEAELKFPDRITIYDTTLRDGEQTPGVCLGTEEKLEIARKLDELGIHQIESGFPVVSEQERVSVKSIANEGLNAEILALCRTKKDDIDAAIDCDVDGVITFMATSDLHLKHKLKLTREEALNVCMNSIEYAKDHGLFLAFSAEDATRTDLDFLKQIYRKAENYGADRVHIADTVGAISPQGMDYLVRELRRDIKVDIALHCHNDFGMALSNSIAGLLAGGTAVSTTVNGIGERAGNTSLEELIMALRIIYEVDLGFNIGVLYELSRLVEKHTRMKVPENKPIVGRNVFRHESGIHVDAVIEEPLTYEPFLPEMIGHQRKIVLGKHSGCRAVKAKLEEYGIDVTRDELCRIVEEVKKNREKGKYINDELFYRIVKSVRGPVDF

SEQ ID NO: 278 - protein, 178 aa, Vitis vinifera
MERACSRGISDEEDGDTSRKKLRLSKDQSAILEENFKEHNTLNPKQKLALAKQLNLRPRQVEVWFQNRRARTKLKQTEVDCEFLKRCCENLTEENRRLQKEVNELRALKLSPQFYMQMTPPTTLTMCPSCERVAVPPPSSEARSHQMATTHHRPIPINPWATATPIPHRPFDALHPRS

SEQ ID NO: 279 - protein, 466 aa, Vitis vinifera
MEWNLRTPSEWDWETLTAFNTKAFEFPGRVQLSNHDIEVDGGVDNGSVYSSGGGGFSGSDLGHGSSSRSSISVSGDSSLKEGIKKFRNVEDFHKDFSENKELIRVGSSGNCPTVGTSDGSGEAMIGLKLGKRTYFEDVCAASTAKTTTSSVNPASSVSATKRFRTSYQSSQTPRCQVEGCNLDLKSAKDYHRRHRICENHSKSPKVIVAGLERRFCQQCSRQVSCLTEFDDKKRSCRRRLNDHNARRRRPHPESIQFSSGRLPSSLYDGRQQINLACNRLPIPVATPMWQNPCSFKDTQTGGSLIRPVKAVGIDKQLHLPTDEMPDAISMLHGNSERMLSFDGSTPRVLNQGLEASAIASNSNVAPDFRRALSLLSTNSWGLNDPGPTSLDQLMHVNQTSMAQPTMHAEPHNWALASSENMHVQQTPSETRGHSLDLHNNGSSMFQEFQLFKAPYESGCFYPNQIN

SEQ ID NO: 280 - protein, 227 aa, Vitis vinifera
MADCEDVGVSSPNSTISSISGKRNDRETNEEENENENEIESSEEDAGGTGDTVRKKLRLSKEQSAILEETFKEHNTLNPKQKLALAKQLNLRPRQVEVWFQNRRARTKLKQTEVDCEYLKRCCENLTEENRRLQKEVQELRTLKLSPQLYMHMNPPTTLTMCPSCERVAVASASSSAPSPSPASNPLAAAPHFPLGPHQHRPMPIAGPWAGAASMRHRPFDAHGTRS

SEQ ID NO: 281 - protein, 288 aa, Vitis vinifera
MCLKLGKRHYFEDSTPGISTDKRGRPYYSGGSSQSSATAVSVVGSPATVPRCQVEGCHVALVNAKDYHRRHKVCEMHSKAPKVVVLGLEQRFCQQCSRFHAVSEFDDSKRSCRRRLAGHNERRRKSSHDSVARNPSQANKLMTGRFAYLSSPTGRALSLLSSKSDSWVSSAELSLRSSAALRELIAENRAAILARQLILDRDWHWHHHGMEDSGGEQPGSDSLMPHQHQMFPGSRSWERFHEANGHVTLDLMQAPSSAFGLLSVREKSKEEEEECSELWNSLEGTHVV

SEQ ID NO: 282 - protein, 290 aa, Vitis vinifera
MEWNAKAPVQWDWENLDIFNAKSTEIPKKLQSDWEIEGEGGIDTGSFYSSGCGAGSGGSGSDLGHAYSSKSSKSASIDSSSKVGIKTSNFTFEAFQDFSQDFNKKRDLERAEPTGSSPNLEASIGSGEPLIGLKLGKRTYFEDVSAGANAKGSVFSVIPISSDTTAKRSRLSCQNAHVSRCQVEGCNLDLSTAKDYHRKHRVCESHTKCPKVIVGGLERRFCQQCSRFHSLSEFDEKKRSCRRRLSDHNARRRKPQPEGIQSNSARLSSFYGMFSTQMLSHFFFQILWSL

SEQ ID NO: 283 - protein, 447 aa, Vitis vinifera
MLHTSLTKHNRLKPPNVRLPPLRLLSLSIQSQKSTRCRAEDFTTPDFYPLPPTISEREFLYKILGEVIKAGATTLNIPDTVGYTVPNEFGQLIADIKSNTPGIENVIISTHCQNDLGLSTANTIAGACAGARQVEVTINGIGERAGNASLEEVVMALKCRGEKALGGLYTGINIRHIVKTSKMVAEYSGLQVQPHKAIVGANAFAHESGIHQDGMLKHKETYEIISPEDIGLFRSNESGIVLGKLSGRHALKSRLLELGYEIEGMELDDIFWRFKEVAEKKKNLTDVDVIALVSDEIFQPKVFWKLGDLQVTCGTLGLSTATVKLIDADGQKHVACSVGTGPVDSAYKAIDLLVKEQVTLLEYGLNAVTEGIDAIATTRVLIRGEKNHTLTNALTGETVHRSFSGTGAGMDIVVSSVRAYISALNKMLGFKDQSKPKVSADRSQDSV

SEQ ID NO: 284 - protein, 440 aa, Vitis vinifera
MASILLNPTFSTTTAATTTSKLNHPSFSTTPISCSKGILKAPIPSTLFFKPPSHSLATKVLSHRLPVRSALRPEYIPNRIDDPNYVRIFDTTLRDGEQSPGATMTSKEKLDIARQLAKLGVDIIEAGFPAASKDDLDAVKIIAKEVGNAVDENGHVPVICGLARCNRNDISTAWEAVKYAKRPRIHTFIATSEIHMKYKLKKSEKEVIEIAREMVKYARSLGFDIQDTFGDCLNIPENCKKIGETHFLLGINANISFLVFSFDKHIPNCSGQCWSILGAFPLLQLWWPDCDNREWGLIGFRFAYQIGDLWIYGFNGCCLGNSVKPFELSQRNSSSDYSSGSWRYMTIGYRGLYTASIRVQSQRFGAKNPNTQTFETNRKEASPITSLPLNNLCQSGRSILHFLCKECTIENREICRHLPPCRLPSKEGDFSWHPSHPNTS

SEQ ID NO: 285 - protein, 531 aa, Haemophilus influenzae Rd KW20
MILEELLVRTFSKDIVMTDRVIIFDTTLRDGEQALKASLTVKEKLQIALALERLGVDVMEVGFPVSSQGDFESVQTIARHIKNARVAALSRAVDKDIDAAYEALKVAEAFRIHTFIASSALHVEAKLKRSFDDVVGMAVAAVKRARNYTDDVEFSCEDAGRTGIDNICRIVEAAINAGATTVNIPDTVGFCLPNEYGNIIAQVRNCVPNIDKAVISVHCHNDLGMATANSLTAVQNGARQIECTINGIGERAGNTSLEEVVMAMKVRQDFMGVDTHINTQEIHRVSQMVSQLCNMPIQPNKAIVGSNAFAHSSGIHQDGMLKNKNTYEILSPETIGLKKEKLNLTARSGRAAVKGHMADMGYNEQDYDLDKLYDEFLKLADKKGQVFDYDLEALAFIDMQQGDEDRLVLDKLSAHSTKEYPATAFVQLKLDGEKLSTSSIGGNGPVDAVYNAILNLTGLEIKMSHYNLTAKGEGAEALGQVDIVVEHKGRKFHGVGLATDIVESSALALVHAINAIYRAHKVADIKNHKHH

SEQ ID NO: 286 - protein, 546 aa, Prochlorococcus marinus str. MIT 9215
MSKDPGRILIFDTTLRDGEQSPGASLNLEEKLAIAHQLARLGVDVIEAGFPFASPGDFKAVNKIANSVGKENGPIICGLARASKGDIKACYEAVSPAPKKRIHTFIATSDIHLKHKLKKSRKDVLQIVPEMVNYAKSLVDDIEFSCEDASRSDPDFLYEVIQLAISAGATTINIPDTVGFTTPNEFGKLISDINKNVPNIDEAVISVHGHNDLGLAVANFLEAVKNGARQLECTINGIGERAGNASLEELVMALHVRKSFFNKFFNRNSDSPTPLTAIRTEEITKTSRLVSNLTGMIVQPNKAIVGANAFAHESGIHQDGVLKNRLTYEIIDAKTVGLSDNKISLGKLSGRSAVRARLEEMGYDLSREDLNDAFARFKDLADRKREITDRDLEAIVSEQVQLPEAKFQLSLVQVSCGNASKPTATISLINTEDNSEDTAVSIGTGPVDAVCEALNKLAKVPNELIEFSVKSVTEGIDALGEVTIRIRRDNKIYSGHSADTDVVVAAANAYVNALNRLVFSEKKSSIHPQFDNLENADKTLLSNPGK

SEQ ID NO: 287 - protein, 517 aa, Bacillus pumilus SAFR-032
MRKINFFDTTLRDGEQSPGVNLNAQEKLIIAKQLERLGVNIIEAGFPASSRGDFLGVQEIARTIKNCSVAGLARCVKGDIDAAWEALKDGVEPRLHVFIATSDIHLKHKLKKTREEVVEQAVAMVKYAKERFPVVQWSAEDACRTDLDFLAEIVEKVIDAGASVINLPDTVGYLAPKEYGNIFKYMKEHVPNIDRVNLSAHCHDDLGMAVANSLAAIENGADQIETAVNGIGERAGNAALEEIAVALHIRKDFYQVESTIQLNEIKRTSDVVSKYSGMIVPRNKAVVGNNAFAHESGIHQDGFLKEKTTYEIISPELVGVTTDVLVLGKHSGRHAFKDRMKTLGFKLTEEEINKFFETFKNLTEKKKEITDDDLISIILEEKVADRKIGYEFESLQVHYGTEQMPTATVSLKNQETQEVIQEAATGAGSVEAVYNTLERCMEERIHLLDYRIQSNGKGRDALAEVYVTVSIEGKETAGRGVAQDVLEASAKAYVNAVNRHLIFKSNLIEIEKHHAIS

SEQ ID NO: 288 - protein, 523 aa, Escherichia coli O157:H7 EDL933
MSQQVIIFDTTLRDGEQALQASLSVKEKLQIALALERMGVDVMEVGFPVSSPGDFESVQTIARQVKNSRVCALARCVEKDIDVAAESLKVAEAFRIHTFIATSPMHIATKLRSTLDEVIERAIYMVKRARNYTDDVEFSCEDAGRTPIADLARVVEAAINAGATTINIPDTVGYTMPFEFAGIISGLYERVPNIDKAIISVHTHDDLGLAVGNSLAAVHAGARQVEGAMNGIGERAGNCSLEEVIMAIKVRKDILNVHTAINHQEIWRTSQLVSQICNMPIPANKAIVGSGAFAHSSGIHQDGVLKNRENYEIMTPESIGLNQIQLNLTSRSGRAAVKHRMDEMGYKESEYNLDNLYDAFLKLADKKGQVFDYDLEALAFIGKQQEEPEHFRLDYFSVQSGSNDIATAAVKLACGEEVKAEAANGNGPVDAVYQAINRITDYNVELVKYSLTAKGHGKDALGQVDIVANYNGRRFHGVGLATDIVESSAKAMVHVLNNIWRATEVEKELQRKAQHNENNKETV

SEQ ID NO: 289 - protein, 393 aa, Deinococcus radiodurans R1
MAGIFMTDAPPPLIPARSWAIIDSTLREGEQFARGNFGTDDKVEIARALDAFGAEYIEVTTPMVSEQTRQDIRKLTGLGLRAKFLTHVRCHMEDVQRAVDTGVDGLDLLFGTSSFLREFSHGKSIAQIIDTAGEVIGWIKTHHPELEIRFSAEDTFRSEEADLMAVYSAVSELGVHRVGLADTVGVATPRQVYTLVREVRKVIHEGCGIEFHGHNDTGCAVSNAYEAIEAGATHIDTTILGIGERNGITPLGGLLARMFTFDPQGLIDKYNLELLPELDRMIARMVDLPVPWNNYLTGEFAYNHKAGMHLKAIYLNPGAYEAIPPGVFGVGRRIQAASKVTGKHAIAYKARELGLHYGEDALRRVTDHIKSLAEQDELDDAHLEQVLREWVSA

SEQ ID NO: 290 - protein, 522 aa, Deinococcus radiodurans R1
MAMTQTENQTAPQQHIRIFDTTLRDGEQSPGVALNHAQKLEIAHTLARMGVDVIEAGFPIASPGDLEGVSRIAREVRGPVITALARANRADIEAAAKGVEAAEKSRIHTFIATSPIHMQKKLNLEPDAVIERAVEAVRLARQYVDDVEFSAEDATRSEWDFLSRIFKAAVEAGATTINVPDTVGYTTPEEMRKLFAYLKAKLPAHVILSSHCHDDLGMAVANSIAAAEGGARQIECTINGIGERAGNASLEEIVMAFHTRRDVYGYETGIRTRELYRASRLVSRLSGMPVQPNKAIVGDNAFAHESGIHQDGVIKARETYEIMNAELVGREAAVLVMGKHSGRAAFRKALTDLGYGDIPDDKVQHLFGRFKDLADRKGQIYAEDLRALVDARSDVPQTFSLEGFQITSGMNMMPVAFVRLHTPDGPVDATAHGDGPVEAAFQAISKITGISPTLESYRIQSVTRGDDALGEVSIHVRHGETQLNGTGVATDIVEASARAWIRVMNMIVAGMGKNKAITQMTP

SEQ ID NO: 291 - protein, 413 aa, Frankia sp. EAN1pec
MKSGTSSCPPAPRPVPPDHARENGSGPEPGPGPGPVRFCDTTLRDGEQTPGVAFTAKEKIAIAVALDAAGVHQIEAGVPAMGPVEVDVLRRVVAAVERAGVVAWCRADRRDVDAAVASGVDAAHLTIPASDLHLRTKLGKDRAWARARIRDCVLDATDRGLRVSVGFEDASRADDGFVIDLAGELRRLGVTRFRWADTVGVANPITLHTRLRALLDAVPGPWEIHAHDDFGLATANTIAAVQAGFTWVSTTVAGLGERAGNAPTEEVAMALRHLLGLPVDLDTAAFRPLARLVAGASRRPVPAGKAVVGDAVFDHESGIHVHGVLRAPATYEPFDPAEVGARRRLVLGKHSGRAAVRHAMDRHGIDAPDEDLEPIVGLVRAHATVYKQPLSSDQLRAMARRVATRRGARPRRG

SEQ ID NO: 292 - protein, 519 aa, Xylella fastidiosa 9a5c
MNTSISSQPPRIRIFDTTLRDGEQSPGCSMPAQQKLVMARALDALGVDIIETGFPASSQSDYEAMTLIARELRRPTLAVLSRCLQADIETSARALESATKPRLHVFLSTSPLHREHKLRMSKEQVLESVHKHVSLSRTLIDDVEFSAEDATRTEEDFLIEVTRVAIAAGATTINLPDTVGFSTPEEIRNMFTRIIANVEGANKVIFSAHCHDDLGLAVANSLAAIEGGARQIECTINGIGERAGNCALEELTMVLKVRNAFYNIDTSIHTSRIVSTSQLLQRLVGMPVQRNKAVVGANAFAHESGIHQHGMLRHRGTYEIMRPQEVGWVCSHMVLGRHSGRAAVEQRLRALGYLLEEEDLKLVFEEFKQLCEKQRLVTDVDLQVLMQDTTVQHGYRLASMTISDIGNRANALVELSDPQGQRVAETAQGNGPVDALFGALAAATGVKLELDSYQVHSVGIGADARGEANLSVRHNDTQYEGTGTSKDIIEASALAWLDVANRLLRNPENMQNKQNTALA

SEQ ID NO: 293 - protein, 511 aa, Desulfococcus oleovorans Hxd3
MTEKLIIFDTTLRDGEQSPGASMNVAEKLRIASRLEELGVDVIEAGFPAASKGDMEAVSQVAQKLSRSAVAGLARTNKDDIDKAWAAVSGARHPRIHVFIASSDIHMEHKLRMPRDTVVEHAIAGVRYARTFTDDVEFSAEDASRSDRVFLCKLFEAAISAGATTINIPDTVGYAIPSEFADLVKYVRQHTPNIHKAVISVHCHNDLGLATANTLAALAAGARQAEVTINGIGERAGNTSMEEVVMAIRTRASSFPLISTIDTAKIYPTSKLVSMLTGMIVQPNKAIVGANAFAHEAGIHQDGMLKNPMTYEIMRPEDVGVSSSTLVLGKHSGRKALYDRLKEIGYNLSPPEIDTVFVKFKELADRKKNIVEEDLEILVSENIMDTADLFQLEYLHVTSGTTVSPVASVKMVINGKSVKGESSGNGPIDAAYRAIAKLTKTESEMLRFTISALTGGTDAQGEVTVRLKEQGLVALGRGADPDIIIASVKAYINGLNRLAYLKRHPVADGMI

SEQ ID NO: 294 - protein, 461 aa, Sulfolobus solfataricus P2
MIKVGILDSTLREGEQTPGVIFTVDQRVEIAKALSDLGVSMIEAGHPAVSPDIYEGIKRIVKLKKEGIITSEIVGHSRAVKRDIEIAAELEVDRIAIFYGVSDIHLKAKHKATREEALRVIAETISYARSHGVKVRFTAEDGSRTDFDFLVTVSRTARDAGADRVSIADTVGILYPSKTKELFSALIREVPNLEYDIHAHNDLGLAVANALAAVEGGATIVHATVNGLGERVGIVPLQQIVAAIKYHFGIEVVKLDKLQYVSSLIEKYSGIPMPPNYPITGDYAFLHKAGVHVAGVLSDPRTYEFMPPETFGRTRDYTIDKYTGKHALRDKYEKLGVKISEAEMDQILAKIKSNTTIRFYRDVDLLELAEEVTGRVLKPRPPEQIEALISVKCDSNVYTTSVTRRLSVINGVKEVMEISGDYDILVKVQAKDSNELNQIIESIRATKGVRSTLTSLVLKKM

SEQ ID NO: 295 - protein, 347 aa, Sulfolobus solfataricus P2
MIARKLADLGVDVIEAGFPASSEGEFIATRKIFEEIGDQVEVIGLSRSNKNDIDKTISTGISSIHLFIATSELHMKYKLKMTKEEVLNKIYESVKYAKDHGMIVEFSPEDATRTEEDFLFTAIRTAIEAGADRINIPDTVGTMHPFKYYDMIKKIVNFVGERIIVSVHCHNDFGLATANSLAGVYAGARQAHVTVNGIGERAGNASLEEVVMGIKKLLNYETNVKTWKLYEVSRFVAEMTGVPVPYFKAIVGDNAFGHESGIHVHGVIENPFTYEPISPEEVGNFRRLALGKHSGIHGLRKLLEEQGIYLSDDKLKIVLAEIKKLAESGNKVTVEDAKNIALKLMNS

SEQ ID NO: 296 - protein, 364 aa, Streptococcus pneumoniae TIGR4
MNFQLAKYSLLKRFLENIGFTTLEEYGAIFKYLIENVKTDRQIIYSPHCHDDLGMAVANSLAAVKNGAGRVEGTINGIRERAENAALEEIAVALNIRQDYYQVETSIVLNETINTSEMVSRFSGIPVPKNKAVVGGNTFSHESGIHQDGVLKNPLTYEIITPELVGVKILLGKLSGRHAFVEKLRELALDFTEEDIKPLFAKFKALVDKKQEITDADIRALVAGTMVENPEGFHFDDLQLQTHADNDIEALVSLANMDGEKVEFNATGQGSVEAIFNAIDKFFNQSVRLVSYTIDAVTDGIDTQDRVLVTVENRDTETIFNAAGLDFDVLKASAIVYINANTFVQKENAGEMGRSVSYHDMPSV

SEQ ID NO: 297 - protein, 533 aa, Microcystis aeruginosa PCC 7806
MNTSPDRVIIFDTTLRDGEQSPGAALNVDEKLTIARALARLGVDVIEAGFPHASPGDFEAVQKIAGSVGSEADSPIICGLARTTQKDIKSAADALRPAAKPRIHTFLATSDIHLQYKLKKTRQEVLEIVPEMVAYAKSFLNDVEFSPEDAGRSDPEFLYQVLERAIAAGATTVNIPDTVGYTTPSEFGALIRGIKENVPNIDQAIISVHGHDDLGLAVANFLEAVKNGARQLECTINGIGERAGNASLEELVMALHVRRSYFNPFLGRPPESTEPLTKINTKEIYRTSRLVSNLTGMIVQPNKAIVGANAFAHESGIHQDGVLKHKLTYEIMDAESIGLTNNQIVLGKLSGRNAFRSRLQELGFELSETELNNAFIQFKEMADRKKEITDRDLEAIVNDEIDTVPDHFRLELVQVACGNNARPTATVTIRTPDGSELSDAAIGTGPVDALCKAIDRVVKIPNELISFSVREVTEGIDALGEVTIRLRYEGRTYSARAADTDIIVASARAYVSALNRLHVALQQKEKTPEMLQV

SEQ ID NO: 298 - protein, 210 aa, Streptococcus pneumoniae R6
MNFQLAKYSLLKKFSENIGFTTPEECGAIFKYLIENVKTDRQIIYSPHCHDDLGMAVANSLAAVKNGAGRVEGTINGIRERAENAALEEIAVALNIRQDYYQVETSIVLNETINTSEMVSRFSGIPVPKNKAVVGGNTFSHESGIHQDGVLKNPLTYEIITPELVGVKIPLGKLSGRHAFVEKLRELALDFTEEDIKPLFAKFKALADKK

SEQ ID NO: 299 - protein, 386 aa, Sulfolobus tokodaii str. 7
MGCQFSVNSKKVRIFDTTLRDGEQAPGIDLTVEQKVKIARKLAELGVDVIEAGFPAASEGEFIATKKILEEVGDQVEVIGLSRANKQDIDKTIDTGISSIHVFIATSDIHLKYKLKMTREQVLDKIYESVRYAKDHGLIVEYSPEDATRTDKDFLLKAVSTAIEAGADRINIPDTVGVMHPFKFHDLIKDVVSVTKDKIVSVHCHNDFGLATANSIAGVMAGARQVHVTVNGIGERAGNASLEEVVMALKKLLGYEVNIKTYKLYETSRLVSELTGVPVPYFKAIVGENAFGHEAGIHVHGVIENPLTYEPISPEEVGNFRRLALGKHSGIHGLKKLLEEQGIYLNDQELREVLNEIKKLAENGEKVNVDVAKEIAIKVSSKKIKV

SEQ ID NO: 300 - protein, 460 aa, Sulfolobus tokodaii str. 7
MKVGILDSTLREGEQTPGVVFTIDQRVEIAKALSDVGVQMIEAGHPAVSSDIYEGIKRIMKLKREGLITSEIVGHSRAVKKDIEVAAELEVDRIAIFYGVSDIHLKAKHHVTREEALNIIAETISYAKSHGVKVRFTAEDGSRTDLDYLIKVCKTARDAGADRVSIADTVGILYPTKTRELFSTLVREVPGLEFDIHAHNDLGLAVANALAAIEGGATIIHTTVNGLGERVGIVPLQVIAAAIKYHFGIEVVKLNKLQQLASLVEKYSGIPMPPNYPITGDYAFIHKAGIHVAGVLNDPSTYEFMPPETFGRSRDYVIDKYTGKHALKDRFEKLGVKLSDVELDQVLAKIKSNPNVRFYRDVDLLEIAESVTGRVLKPKPPENIEALISVKCESNVYTTAVTRRLSVIPGVKEVMEISGDYDILVKVEAKDPNELNQIIENIRAVKGVSSTLTSLVLKKM

SEQ ID NO: 301 - protein, 522 aa, Sulfolobus tokodaii str. 7
MFTKSVEVLDTTLRDGSQSANVSFTLNDKIRVALALDELGVDYIEAGWPGSNPKDEEFFKEIKKYSLAHARIAAFGSTRRKEFNAKEDPNLNAIIKSDVDVAVLFGKSWLLHVTDVLRIKPEDNLEIVYDSISYLKSHGLKVIFDAEHFYQGFKDNREYALKVLKTAEEAKVDVIALADTNGGTLPHEVYEITKVVVGEVRTKIGLHMHNDSGCAVANSLMGILAGARHVQGTINGIGERTGNADLIQIIPNLALKMGFNVLKGKESLKKLREVSRLVYELAGLHPNPYQPYVGDFAFTHKAGVHADAVMKVSRAYEHIDPSLVGNTRRFVISELSGTSNLVTYLENLGLKVDKKDERLKNALKKIKELENKGYSFDLAPSSAILVALKELGIYEKKINVEYWKVINESGNLSIAVVKVNGQLEVSEGVGPVNAVDLALRKALQKVYPEISNVKLTDYRVILPGEIKNTESVVRVTIEFTDGNVTWKTVGVSSSVIEASILALIDGLDYYLQYKKLKTLKNN

SEQ ID NO: 302 - protein, 381 aa, Staphylococcus aureus subsp. aureus Mu50
MIRIQDNTIRDGMQQSNVRKSLIIKKEVLKQINKLNINSVEVGMCTTIEDEFNIHQFRDILSPEKELVVLTRLNEKEIKKIVKLKIHNLVVKILLPISDLHIKEKLNFSNKYYIQKIKDCLDILKKDKKGVDICFEDATRTSREKLKEYMEIISKYQVRTVTFADTVGCSTPLEYGDIFNYFVKKYSNIIFSAHCHNDLGLATANTLAAILNGAKQIETTFLGIGERAGNAPIEEIITILTKKQIESTEFTLPDVYKTSINISKILDFQISENKPIIGENIFKHESGIHQDGTKKNINMYQYLVPSDLGLKNSQVVQFPISNISSKKILHNKFKSIVNTEEIDENISFYKLVNKFSPEVAPEDTVDLLQIIKRRSKDGNFK

SEQ ID NO: 303 - protein, 509 aa, Staphylococcus aureus subsp. aureus Mu50
MSSHIQIFDTTLRDGEQTPGVNFTFDERLRIALQLEKWGVDVIEAGFPASSTGSFKSVQAIAQTLTTTAVCGLARCKKSDIDAVYEATKDAAKPVVHVFIATSPIHLEHKLKMSQEDVLASIKEHVTYAKQLFDVVQFSPEDATRTELPFLVKCVQTAVDAGATVINIPDTVGYSYHDEYAHIFKTLTESVTSSNEIIYSAHCHDDLGMAVSNSLAAIEGGARRIEGTVNGIGERAGNAALEEVALALYVRNDHYGAQTALNLEETKKTSDLISRYAGIRVPRNKAIVGQNAFSHESGIHQDGVLKHRETYEIMTPQLVGVSTTELPLGKLSGKHAFSEKLKALGYNIDKEAQIDLFKQFKTIADKKKSVSDRDIHAIIQGSEHEHQALYKLETLQLQYVSSGLQSAVVVVKDKEGHIYQDSSIGTGSIVAIYNAVDRIFQKETELIDYRINSVTEGTDAQAEVHVNLLIEGKTVNGFGIDHDILQASCKAYVEAHAKFAAENVEKVGN

SEQ ID NO: 304 - protein, 78 aa, Chlamydomonas reinhardtii
LCHVDDCNVDLSSLKEYHQRFRICDFHLKAEVVLREGIPQRFCQQCGRFHLLSEFDGTKRSCRARWVCGGSTHRSSTS

SEQ ID NO: 305 - protein, 149 aa, Chlamydomonas reinhardtii
MDEDYDTANMHNYAAGSNVARWGRLEELDPGDEAFLKSLERKQQLRKPLRCQVGGCTADLTDVKKYFQRYRICERHLKAPSLKMDGRAVRFCDQCSKFHDIGAFDGARRTCTEKLEKTRQARVALNGGGGGGSMSLDLERRAAGPQRRQ

SEQ ID NO: 306 - protein, 73 aa, Chlamydomonas reinhardtii
QVEGCGHDLTTEKSYYQRYRVCEPHLKLLSLMVDGKPCRFCQQCGRFHELNEFDGNKRSCRARLIQHNARRRK

SEQ ID NO: 307 - protein, 78 aa, Chlamydomonas reinhardtii
CHVEGCTVDLASAGPYYQRYRTCELHLKAPYIIKDGMQQRFCQQCGRFHELSEFDNNKRSCRARWGHHNQRRRKRTEE

SEQ ID NO: 308 - protein, 2059 aa, Chlamydomonas reinhardtii
MDITSPRDMAVASASGRQASEAPGTGPPPFSHSRLRSYASKVEGLLDPKMVLSSSVALAGSGLADPFPSASSSSASQQLLTPKSARFAGTGGGSNGIAAARPGGHNQPSAAALGSNGQHSHQQGSQPQQPQQQPASAEELAAALNQIQTLKAEIAGVETVLGYLKGNEAATTTMGRKAHKLPSQQQLRQRADALAGALDEALPPGSITAKYGTGAGAAVTGGLEPAFWSGGEARRDFDMLDMVQREVARQCEAARQVAASCSERGRIIDKLADRHAELYGAVAAAARSATEAQRGLSERLAGVTTRASEQATEIARLRSELAARGAEAEDLRQQLAETRTQHEHYVWDCEQELETLQGQSDILAAEVEHLHVRLAEAVADKDAALSRGLARLEADLEAVTDERDDLSQRIRFLERQLHKLRTEMNTAVVTAVAEVQTDPVNWAAEEPEDVPDDVSDTPSLAEIRARYAAHGYGALSPEERLRLGLPAHMDGEGGGKSGKGKKRKRALGHFQWTVNAIATMYYDKMKADARSDLEGNPRQRLADFAVDWHMTRFGLRNLAELNLLDLIASVRQHYKTAVRVRWFGQFTGLVEVGDQVDTTPHVSFYLHLLACLAAPNSLVSLFPDTAASGGAASEEAGGGTPPVAVKAAVLPEAIKAIYRYLNEPESATAFLARACDPLTDPDSQTVPLDPLVALLMAEYQKRWERNAAHLRALFRAGDYDGDGLIGYDEFVAIVRQLLPDSGDRAFTKMYGEAMRKLPAGQNLLDVETFLGVARAFGCDRWRIDAGPTASAYGGGPYGIVTSPSGAAAGGGGLNGPSRSGSVLGSAPSMGALRARATSAASNLRRTESVVGLSEPDRALLRVLDGAVEGLEPPLEEQLTSLLDKLRTSAAATAQRAEALTAATAALPGFELGGGPNAKELATAAAEDNAMVSVAWGGISKLEAQYSHFKTTYEDRTDPAAAWLAFRMLLASLAAAAAGARVKPNPSNARSRPGSAKSQAGGDRHWAGAKALARLTVPAVPFRAGSSAAASRPGTNGSLAASGPSGLPGSPNELITSLEKVIWHSRRILKSGNFQEHHVAHTKLEHANLTQASDLTSWARAATAWLGAAMRLQAGDAAAATQQGGGIFGGVAARVSHARDSHRRRRRHLSSSENVFSTREDDGAEQLTLLVPVMRRLLLAQLLKAWLRDMRQQLPAEPQAAQALAVLIRKLFEVHVGSVVQRAALEYFHISKAGGTSWTVAAKSNKCPRPAARGCRVKEFDDSCRWLNRTALLDVGVPQGRHHKAPWGRYGHVDRSTEYATCAQRYEYVRRRGFVYTTNEYTLHRDLAPERSLDERAEVLSAEQVVERLQSPEGQDAWHSAHLCPQFVNILTVREPRQRLLSNINFMLPFLQSQLFPIRKRNDTQSAAQVADFQAIFCNAPSETWETVVPPVADNYNVRTLLGELGFHLPLWSVGPEHVAAAESQLLRFDMVMDLNAGSGAADLVQKQGLGWHVTLAEVHALDSSQRQDRVPCGLGNLTKLLERQGPDQQWYSFARVEPPCHLDLSKLIQAGTKSFFNNPLLSDIVLVCPDGRALHCHSVILAAASRRLAAALKQGNWTPGQQMPVKGVDSDALETLVYAFYTAECPLELARVPALYDAAIKLEVPSLAPALEQYTASALQPHNCCAVLELCLGAGVGPLAELVLEWIRSRVADVVPGPEFRACRLETAALICKDLAGRSQLVGLQVAVAWLTASSARGSLVGVFAEATGLAVDAIQAVANSGGALGPIGGLGAAGDLSSALMDGPLRLGGGGPGRDLDLPSLSMGGKGMCHVQGCNRSLAGLRDYYQRYKICEHHLKVSQVLKDGVPHRFCQQCGRFHPLTEFDGDRRSCRTMLQRHCHRRAKQKQELAEVLAQRYEEKQVAASMTAVMAAMARGTPAGVPALPPMLQLQYLAGLPAAAAAAAGRDDGGAKDEDMDGRGGGGRSLPAGLHSPPSRAALTEAVQQRARKQQATVLSQSGLLGLAGSGEGLPEGQLAAAMAAAAAGLTLGLDNLPAVGQLPGSGGVAERKFGDQELLTGGG

SEQ ID NO: 309 - protein, 1232 aa, Chlamydomonas reinhardtii
MASDLANIFNDEEAGSDRANSITSSDLDPFLLQGDDQTWAVEDWNWDPFNMFAAPKETPNVACCQALKRRKVTEQSATSAPQQAAQQHHQHAACQPCHGASGSRAGPPAAPTAACCSMAPGVQQHAPAPAPAQQLTGPLQTALNSMMPGQQQQRVADACGVSNMCHAPGMVAPPPPMPVAAPLAATGHQAGGMGMGHMNPAMGHMGWPAMPDMSNPAAAAAAAAAAASFFPTMGAGGRGPLATMGWGAQPMALQMPSMGLPGFPGGHTQCAPALQMPAVAFPTPSSGIFHQQASMAVPPSALPSPALGCSGDTTSLQGSADNCAKPPCCSGNRATGPTCSGGRQQADSSNKAAPPPPKQPAQNTVGARGGAAAPAPGDLSDFNISDSEDDDEVARRPSAAGTQRGGVGNAAALNAAAYANLGDIVSLQDVGDDTGAMVCQVPGCGKDLTNLKEYHQRYRICDVHIKLQQVLKDGRLQRFCQQCGRFHDLTAFDGNRKSCRDQLSKHNARRRRRAQAEQAKGRAAAQEAAVAAAGAMAAAAAVGGAAGGAPAVPGFEGGDVGKLLACLMQNPTQLHALRLLLGVPTHPALPAAAPAAGLGMAAGGDTAAQPDQARTYGLARDILAGRNEFSPAFESEHRMIRLSMKLFNKTPADLPHDLRNQVTSWLASAPLAMEASIRPGCVFLTVQMLVDEAGAQQAAAPGALHGLVEHLLTRTGCPFWHMGMYTVQMGTDMLLVRDGKMAGDANVNASGAAAPAATGEGAEAAARVRGDGRFPVVRRLGPLAAVAGQPTVLKLHGLNLDAPGCSVILRWGNKHLKAHMQALSTHRAIVRLPPLPDLCGPVWVEVARGAYLSPAKQLLVARNEELVQEINKLDVKTGPLRHDTVELLLQDLALVLQHIAAQPGVAAQLQHAVIALKARRLLAMACDMGWAAVASAVLPLACARCSCASEMVAAIHSASTPSQTGAADKRGLTLLHRAVRSGSVSLLAGMLAWGDSHGYRWRVDAEGPAGITPLHLSAMLDDARIGLLLLDHCGWPAAFTHLRSDGGVTPFHLAFQMGHYQVDALMSALGGLHQVADPNNAAAINNAAAAAAAAMSPSRRSRCGNAAAMGCKPDPDEDVKPDLAALQRGGRNGGGGSGGCTELDPCENCHCTLPPLLLSIMASCTDCGRRRMCMETECNNAAQRCGDCGCGGARPTARVDSGEVCSSRQHGTIFSITALCQGCHANRTLAVA

SEQ ID NO: 310 - protein, 71 aa, Chlamydomonas reinhardtii
MPPSRPTSPQPLNQVLGCGLSLAGMKGYFLRHRVCEEHSKAPVLIIGGAPSRLCQQCSKFHHVNAFEGAKR

SEQ ID NO: 311 - protein, 444 aa, Chlamydomonas reinhardtii
QDLERAWDAVRHAKRPRVHTFIATSEIHMKVSQQGSATSGLHNAVAAVKHLRSLGCTDIEFSSEDAGRSDPKFLYRILGEVIKAGATTLNIPDTTGWCLPHEFGELIAAIKKNTPGADNVIISTHCQNDLGLSTANSLAGAQAGARQIECTINGIGERAGNASLEEVVMAIKLRGKMVSDYSGMVVQAHKAIVGANAFAHESGIHQDGMLKNRETYEIMSPESIGLPRQEQDRGIVLGKHSGRNALNSRLRTLGYELSQSELDDVFKRFKALADKKKGITDEDILALMSDELHQPKVIWELLDLQVVCGTMGMPTATVQMKGPDGIARIGVGVGTGPVDAAYKAVDSLVRVEAELSDYSVSSVTQGIEALAHTRVMIRPSGKMSDAGYSEHAALGTVQRQFSGSGANEDIVVASARAYVSALNKMIGWRRVGRRREWASSGRWG

SEQ ID NO: 312 - protein, 72 aa, Chlamydomonas reinhardtii
QVQGCTRRMQNEKQYYRRYGVCENHLRALELLVDGRMQRFCQQCGKFQDITEFDDVKRSCRTQLARHSLRRR

SEQ ID NO: 313 - protein, 76 aa, Chlamydomonas reinhardtii
LQGCGLPLADAKLYLRRYSVCEAHFKAEYVLLSGGRYRFCQQCNKFQPLDNFNGSRRSCKARSEDRNLRRRKQRTD

SEQ ID NO: 314 - protein, 1020 aa, Chlamydomonas reinhardtii
MANSCAASGGHDVEDDVQHQPRVPAGYQQASRGAHGGAGAAGRRGDGQQGTVFGGTGGERPSGTAVSGTAGSGGDQDDAVSGARHAAAGGHGRGKDRDGDQSGVQHQVMEALRKLNPDLQGQAIVVVVNPTGSPPPAAAPPAAIVRHGSGVRVMCQVDKCNQAMACQQEQYQRLRICEHHYHALEVQHEGMRQRFCQSCGRLHPVEEFESNMHACRARCGVDSRQRKRLRPDEHADTAECRPAPGMHGRVAMPQQMPRHGAHQVAHHVAHQVAHQVAHQVVQGVMLPASQPPQVPTWDWAMQSDQQRMHAGVPAVEHGQCQDLAAGTPSSTGSAGNAPQKHSGQMALPPLPQPHLPQQGQRGGMLPPQQFHQQQQQPNLASYPSVPPPRRPQMQPTDQPLHRVSSVPAQFQGGESNQHCMQPPAPQQPQNAPVRHLSLSGLPTGAPGSMPLHPNQRVRPSNPTPQLQMQQAPDLPRQYSAPPQQGQVVVQLQPATGAQGEDKLVAFGAPAAGGMAKLILSTVPLDAPAGNAGAGGAQGLMHAPSSRPAGPQQPGQLQAPLRRPSPGVVRPGGTDSHVSTSRGALPQQGGAPALRQSLASGPGRPMAPHHGMQSVNPGGRPGAPQRTTMPPPSSAPAQRQSAPRLAEGRAPSLNLRPSAEATGARVNAVPSQQLMQQLPPPPQQAPTQASAQAGAPMWPAPQQGLPQAAQQHAFIQQQQVQQAQQVQVPQAQRPLEQQQQQQQLPEQQAQPPQEGSLNQDAFCGQAALASEYPQLQSMPMHMDSTEYAYGEQACNGGAPQTADPSPPQPPQPPPPPPPGWQQLPPDQNALYGQGELQYHQPQMQPLFHDGAMQAAGSAAAGNSAVGGAAGEEPTTPRHAGIRAPQVAVMGGGGMAAALAATISGNAAVSSFDNRLGLPRDLRVSINGNYSFGDLHELVTPGSHGLLDSGLVSPNTELFNILNTGNGAEDTLGMGPMLDLLGPGESMYDDTANTSQALLPGPSGAGTAGPSVPPTLPLPPQQ

SEQ ID NO: 315 - protein, 1318 aa, Chlamydomonas reinhardtii
MEAVEHFSAAFSAQHQGWASSKYAWDPSSLVAVPGPDAARSSPSVEGDHGTDADRDQSLGPTPINWKPAGARNTGAESKSHAARLPKTLVCQVEGCGHDLTGEKGYYQRYRICEPHVKLLTVEVEGRACRFCQQCGRFHELSEFDGTKRSCRARLLLHNARRRKRDPVDASTKEPRSQRKAKATHPRSDDSNDNELDSRGSFGASHGTWPASGAPTSVPVTEADPAATPAVSSGAVPQLMTRAGLNDQSLPLPGFQQPVSQALQSAGYAPAFANTLAVKHEQPELLVSTSGGAAVLGVMMQRESLPLDLAHAFSDEADLPLVDTLKLDDFMLDGLMAMDYIDELPGPRQLMPGYSPMLTGDESMMGVGIMPPTAAMGSAALHAPYMPVSGDVSMSRAVPRTVLNEQSQMQQIADAQRRLLQSAGVLPGPTHQGTFLAEPQQVNDGLNSGMSVCSLGGGGFTSPCSSGMGKPLGSGFSVPPHPSAGSHHMMLSSGVTLNVPSAVPSPINVGPSMAQAQAQMQAQAPFGAVGGGMSSFDMARRLVAGGGAGAQYRSDDFLVRVSIKVANCTPEELPPDLYQRLQSLLATADASLIQGFLRPGCVHLVLDISGGEGLQQALLAARVRSALGPVAQKYATLVQVGEEVAMWAEDAPAAAQPASAARVPELEATGAVPVLLHVSPAAYLCHSTADGSSSASVVVYGSGLVKAGVQLFARMQGGYLPVRVQPLVAEGQLMVQGAEAVAALQDLAQLAQGGRSATDALLVSVEGAPASGLLLLEAQAGPLLSAWRPCLLSVDSAMATELTAAGVQARAAGNDRLQSLESFVTDLGRLVDACSFAKAGTGDAEEEAVSMERLCACEHMLAWASEAGLPAVSSFLVHTLLQYGQELGTVLEAPYADGLSVLHRAVRSRSEAMIRAVLGWAAREGVELSWRGEDAVGQLSPLHLVALVPVAWRVLATEPAVQRAWARERAADGATPALVQQILFSCLQAATNARRASAPVAEVVVAAGAQAAAAQVCAAPRTLETIETAVAPSAAGAVSPATAPTPTRPASILRAVLPLMAVLAALTYASLMHTLQASYLPVVVVTCVLMYALWRLLTTVAARPQHAVLMSMLASPLPPVFSSARLEAAYQMRASMAATQLSRDAAALLVLLAMCAAAARLPDASAFATAVNTCLTLLPLAAMKLSRQGYIRVRDIALTGAYVAMLNAICSTSQSLLADSPRCRCAMLFLAVTTAAGAVAPLNTSGMLFTLAYTVSMAMRAWTQTQGLFGGASSVTAAQACSAAQLAVVAAATAVSFARELAARQQWLAVAGEAASGK

SEQ ID NO: 316 - protein, 81 aa, Chlamydomonas reinhardtii
QVEQCGIDLKSAPKTHQRFRLCNTHIKAPVVVVDGVHSRFCQQCSRFHPVDEFNGTNRTCRMMLAKNRARQRSTTSGPGSG

SEQ ID NO: 317 - protein, 88 aa, Chlamydomonas reinhardtii
MLRGSPTLSCPGLYTSQVDGCGRDLSAEKAYLQRYSVCEGHFKAEVAVVHGQEMRFCQQCNKFQDLREFEGSRRSCAARSKDRNMRRR

SEQ ID NO: 318 - protein, 1758 aa, Chlamydomonas reinhardtii
VAGHRREARLPAVDPLRRVPVAGLRWLPGTMTILKSKWMKAMSETEQLQQAGSPDFSAAAAKCFHVVKDCPAADLSQGKAYYRRFRICEKHLKTLSLCIEGKPSRFCQQCGRFHVVEEFEGTKRSCRRALLTRFYKRRNLPVPANALPAPQDPSPAAAKPPGAAAAEPRDTGAKSKSKVRSSSSALSGGGPDAADGDTSQQQQQRRKRGRPRAPPMDVRDLAPADEAAAGEVMDAGVRGVRAGVGVASNLDPTMDLRAAAAAVTGGIAGIAGAAGVAGGSPDAAASGAGLASGTAAADMGVGLWSSGSSGRGGIAGGDSSTSVAEQAILLELLQHQRQQQQQQDASILRQAGFGGGLGSGAFARGSVGTGPAGVQPERNGAANPLQRQQQLMTAAGADPALSQHLFSQQLQQSSSAFPTMDEGGGATRRLLLSASSSHAASASAGGSDGSGGLRAALLPGGDSSLSRLQRHIMLLHQHPSDAAKSAAAAGAASGAAANSGSYSRPLLGRSSLQLNMDQDFRHVPGGGAGPRALGLPHHHKQQLQQLQQQGGSGSRRPDILSTSADGGGGRLIVTIPPGALAAAGAAAGDLNFQLGSRYLLQSGRGAAADALSAVPAGSSTAGGTALGYRQGAMGGTNALLQHINPLQQMQQVLAAGGSGSSGNWQLQQAAAAAVGLAGGGGGKGSGSLRDAAQSLLGQGGARAAYSPPAGMLERLSIKLHNCRPDQLPPDLAERLVQLLASTDASVQQGFVRPGCTNLIIDLLYGDWERLLAGLLLYSCQSQAQESEPAGAASGGPSAAPSSLEAHAALEGRIHVQLGNQLLVIDGSHVQLRRRAVMVPAAVPPWVDGCGSGEGSSTASCPADGSRFVDRQRRRPAATTSSGPRWARSSSSDTAVSSAAGGGGRCTAWSGPELAGVAPMAVVAGQPFTLELAGRGLQLPGSCVHVRFRGGHLDALPETGTNENAGDTTSCCSLTGAMGDNGGLPMTLLMSSSAATSAAGQQQPQHAPHSQLDSRLQLQPLLMGCRQPHDAAAAGGGGGGRSVAAAAEASCTFRPRQGPSAAAAAPPAAVASEGIPAAAPSAVPASAASAAGAVSPHAVESPVGGVVIGAAAVAVSLPPAILPTATGYGSAAATVRAAALPEGPALMSKGGGSSCVRMAAGARQQQVVGEGKVASAHRALPIDAVAHDVAMGGAGTIATAGCVSYNEVDGETFSRPSNSGDGWLSLQHRGGRLGAAGELSRSGGGSQRSSSGAEAASLQGSASAPPPLCGGKATAALLPSKHSSLGLISRGRSSSARELMRTATTGGGSMAALGVDDTMNDILQTTAFAHAVALRRNTCDAAGGAGDRATAAQLPAEQPPRQHPLTSYQQWLLEQQAAAGGAVVLPETAANGDGSTAAAGVISRTLVFARAAGSRSTLPSSKSAIRPHQEQQQLECLTLLQQQQTIEPASGQQQAAQRLLQPPAVSAQPSTSTTGALLGGWPAGGCGGSERFEHSSSLPTSVLLGDLTATEAAAFMGFTAASTELKGVAGAISGGWPPAALLGYPHCAGLVLAYLLRRDGVNPQLADAVAGFASPLVPRDWRGVAAAGTAEPAAAAAAEPTSPPSSAEQSTASSLAQCAAVAGPGAKEQLRSRGERQEAQEGKEVDVLSGAFARLCARLRLRAGGVGLLHHAASEQQQEYQHAGSGHTQQASPQQRGTQPSAADEEQPEQQQQTHSLQQVPADAHMQSQQRQEQRSRMRPSGGGRWHKAAAVVVCMLKY

SEQ ID NO: 319 - protein, 72 aa, Chlamydomonas reinhardtii
QVEGCNADMTAERPYYRRYSVCEAHIRALQVQHAGKTQRFCQQCGKFQELVDFDGDKRSCRTQLAKHSARRR

SEQ ID NO: 320 - protein, 77 aa, Chlamydomonas reinhardtii
ARAQVTGCGLCLEGLKRYYIRMRVCEKHLHAPAVLVNGTISRFCQQCGKWQAVAEFEGSKKSCIATLERHNARHRAK

SEQ ID NO: 321 - protein, 536 aa, Prochlorococcus marinus str. MIT 9211
MAKDPGRVLIFDTTLRDGEQSPGASLNLEEKLAIAQQLARLGVDIIEAGFPYASQGDFTAVQRIAEQVGGEEGPIICGLARASKADIKACGEAIAPAPKKRIHTFIATSDIHLEHKLRKTREEVIQIVPEMVHYAKSFSEDVEFSCEDAARSDPDFLYELIELAISAGAGTINIPDTVGYITPSEFGELIQGIDANVPNIDEAILSVHGHNDLGLAVANFLEAIKRGARQLECTINGIGERAGNAALEELVMALHVRRSFYNPFFGRDPESPTPLTAIRTEEITKTSRLVSNLTGMVVQPNKAIVGANAFAHESGIHQDGVLKNRLTYEIVDAKTVGLTDNRISLGKLSGRSAVRARLEELGYDLTRDDLNEAFAKFKDLADRKREITDRDLEAIVSEQVMQPDARFQLQLVQVSCGTTLKPTATVTLADQDGTEQTAVALGTGPVDAVCKALDSLAGESNELIEFSVKSVTEGIDALGEVTIRLRREGKIFSGHSADTDVVVAAAQAYVNALNRLIYFEKKNPIHPQHDLIKANL

SEQ ID NO: 322 - protein, 475 aa, Oryza sativa Indica Group
MASFGMNWNQKSPVFWDWENPAPFGPNTMENPKSIPHPEPRGVVVAAANHGSTNSSGGTFTSSSELANGSSKSSLSASFDSSSKLGNSLEFRFASVKGHGKNMCKDGEAGRVEDSGTSPAVAVSHGEPVIGLKLGKRTYFENVCGGQNVKSSSAASGVTCPSTVVKKMKVSQQSTQSSYCQVEGCKVDLSSAREYHRKHKVCEAHSKAPKVIVSGLERRFCQQCSRFHGLAEFDQKKKSCRRRLSDHNARRRKPQQEAISFGSSRLATMFYDARQQTDIYFGQSPFGQVRSNAISSCDNLGGFKFTEAKLPWMKPMKTIGLEDLNFSTLQMPGNVVSHTVHHHDFDGLIPFKGNTTKVLNQGVDPACAVVSSNSNGAPDLRRALSLLSSDSWGPADVQAGSQVHPGGVMPPLAVAAATVTAPTNPVSVMHALHPSTGGGGFWQDGDDPPPLDHASQAQAFMHPGNGSSSGYGHLH

SEQ ID NO: 323 - protein, 518 aa, Bacillus subtilis subsp. subtilis str. 168
MRKINFFDTTLRDGEQSPGVNLNTQEKLAIAKQLERLGADIIEAGFPASSRGDFLAVQEIARTIKNCSVTGLARCVKGDIDAAWEALKDGAQPRIHVFIATSDIHLKHKLKMTREQVIERAVGMVKYAKERFPIVQWSAEDACRTELPFLAEIVEKVIDAGASVINLPDTVGYLAPAEYGNIFKYMKENVPNIHKAKLSAHCHDDLGMAVANSLAAIENGADQIECAVNGIGERAGNAALEEIAVALHTRKDFYQVETGITLNEIKRTSDLVSKLTGMAVPRNKAVVGDNAFAHESGIHQDGFLKEKSTYEIISPELVGVTADALVLGKHSGRHAFKDRLTALGFQFDSEEINKFFTMFKELTEKKKEITDEDLVSLILEEKVTDRKIGYEFLSLQVHYGTSQVPTATLSLKNQENAQLIQEAATGAGSVEAIYNTLERCIDKDVELLDYRIQSNRKGEDAFAQVYVRVLVNGKESAGRGIAQDVLEASAKAYLNAVNRQLVFQSNMSGLKNHTAVGS

SEQ ID NO: 324 - protein, 232 aa, Triticum aestivum
MGRGKIAIERIDNATNRQVTFSKRRGGLMKKARELAILCDADLALIVFSSTGRLYDFASSRGMEAILERYQEAKQEHCGVLNPTSEAKLWQREVTTLRQQVHNLQHNNRQLLGEELSGSTVRDLQFLVNQLETSLHSVRKRKEQVMAEEIHELNQKGFLIQKENIELGKKVRITHEQNIELQKKLSGAMRSSEQQASGSSSKAAAGLLLSTRAGEPRIFIDLELRQQEHEDE

SEQ ID NO: 325 - protein, 232 aa, Triticum aestivum
MGRGKIAIERIDNATNRQVTFSKRRGGLMKKARELAILCDADLALIIFSSTGRLYNFASSSGMEAILERYQEAKQEHCGVLNPTSEAKLWQREVTTLRQQVQNLQHNNRQLLGEELSGSTVRDLQFLVNQVEMSLHSVRKRKEQVIAEEIHELNQKGFLIQKENIELGKKLSIAHKRNIELQKKLSGVMRTSEQQASGSSSKAAAGLLLSTRAREPRIFIDLELRQQEHEDE

SEQ ID NO: 326 - protein, 230 aa, Triticum aestivum
MGRGKIAIERIDNTTNRQVTFSKRRGGLMKKARELAILCDADLALIVFSSTGRLYDFASSSGMEAILERYQEAKEEHCGVLNPASEAKLWQREVTTLRRQVQNLHHNNRQLLGEELSGTTVRDLQFLVNQVEMSLHSIRKRKEQVMAAEIHELNQKGLLVQKENIELDKKLSIAHEQNIELRKQLSAAMKSSEQQACGSSSKAAAGLLLSTRVREPNIDLELRQQEHEGE

SEQ ID NO: 327 - protein, 524 aa, Caulobacter crescentus CB15
MTSVPAGAISKRDNVVVFDTTMRDGEQSPGASMSLEEKLELAKILEEMGVDVIEAGFPIASNGDFEAVRQIAELITESTVCGLARAAAGDIDRCAEAVRRAKRGRIHTFISTSPVHMKYKLQMEPDAVLEAITRSVSHARNLVGDVEWSAEDATRTERDFLKRCVEAAIKAGATTINLPDTVGYSYPSEYGELFRDVITSVPGADKAIFSAHCHNDLGLAVANSIAAIEGGARQVEVAINGIGERAGNAALEEIVMALRVRGDHLPYGTSVDPVHITRASRYVSAITGFPVQFNKAIVGKNAFAHESGIHQDGMLKNAETYEIMKPEDVGQGATNLVMGKHSGRHAFREKLKALGYELGQNALNDAFGRFKELADKKKHVFDDDIVALVDDALARGSEKIRVSRLRVVAGTDGQSAELTLDIDGVASTAEATGDGPVDAVFNAIHKIVPHSAALRLFQVHAVTEGTDAQAQVSVRLEEDGRIATGAAADTDTLTASAKAYVNALNNLFARKEKSRPEAAIASGF

SEQ ID NO: 328 - protein, 523 aa, Salmonella enterica subsp. arizonae serovar 62:z4,z23:--
MSQQVIIFDTTLRDGEQALQASLSAKEKLQIALALERMGVDVMEVGFPVSSPGDFESVQTIARIIKNSRVCALARCVEKDIDVAAQALKVADAFRIHTFIATSPMHIATKLRSTLDEVIERAVYMVKRARNYTDDVEFSCEDAGRTPVNDLARVVEAAINAGARTINIPDTVGYTMPFEFARIISGLYERVPNIDNAIISVHTHDDLGLAVGNSLAAVHAGARQVEGAMNGIGERAGNCALEEVIMAIKVRKDIMNVHTNINHHEIWRTSQTVSQICNMPIPTNKAIVGSGAFAHSSGIHQDGVLKNRENYEIMTPESIGLNQVQLNLTSRSGRAAVKHRMEEMGYQESDYNLDRLYDAFLKLADKKGQVFDYDLEALAFINKQQEEPEHFRLDYFSVQSGSSDIATASVKLACGEETKAEAANGNGPVDAIYQAINRITGYDVELVKYDLNAKGQGKDALGQVDIVVNHHGRRFHGVGLATDIVESSAKAMVHVLNNIWRAAEVEKELQRKAHNKENNKEIV

SEQ ID NO: 329 - protein, 240 aa, Zea mays
MGRGKIVIRRIDNSTSRQVTFSKRRNGIFKKAKELAILCDAEVGLVIFSSTGRLYEYSSTSMKSVIDRYGKAKEEQQDVANPNSELKFWQREAASLRQQLHNLQENYRQLTGDDLSGLNVKELQSLENQLETSLRGVRAKKDHLLIDEIHDLNRKASLFHQENTDLYNKINLIRQENDELHKKIYETEGPSGVNRESPTPFNFAVVETRDVPVQLELSTLPQQNNIEPSTAPKLGLQLIP

SEQ ID NO: 330 - protein, 533 aa, Synechocystis sp. PCC 6803
MNSPVDRILIFDTTLRDGEQSPGATLTVEEKLSIARALARLGVDIIEAGFPFASPGDFEAVQKIAQTVGTENGPVICGLARATQKDIKAAAEALKPAAKHRIHTFLATSDIHLEHKLKKTRAEVLAIVPEMVAYAKSLVNDIEFSPEDAGRSDPEFLYQVLEAAISAGATTINIPDTVGYTTPAEYGALIKGIADNVPNIDQAIISVHGHNDLGLAVANFLEAVKNGARQLECTINGIGERAGNAALEELVMALHVRRSYFNPFLGRPADSTAPLTNIDTKHIYATSRLVSELTGMMVQPNKAIVGANAFAHESGIHQDGVLKNKLTYEIMDAESIGLTNNQIVLGKLSGRNAFGTRLKELGFDLSDTELNNAFIRFKEVADKRKEITDWDLEAIVNDEIRQPPELFRLERVQVSCGEPSVPTATLTIRTPAGPEETAVAIGTGPVDAVYKAINQIVQLPNELLEYSVTSVTEGIDALGKVSVRLRHNGVIYTGYAANTDIIVASARAYLGALNRLYAALEKSREHPPVVASL

SEQ ID NO: 331 - protein, 515 aa, Vibrio campbellii AND4
MNNQVIIFDTTLRDGEQALSASLTVKEKLQIAYALERLGVDVIEAGFPVSSPGDFESVQTIAKHIKNSRICALSRAVAKDIDAAAEALKVADAFRIHTFISTSTVHVQDKLRRSYDDVVEMGVKAVKHARNYTDDVEFSCEDAGRTPIDNLCRMVEAAINAGATTINIPDTVGYTVPSEFGGIIETLFNRVPNIDKAIISVHCHDDLGMSVANSIAAVQAGARQVEGTINGIGERAGNCSLEEIAMILKTRQEFMGVHTGLKHDEIHRTSKLVSQLCNMPIQSNKAIVGANAFSHSSGIHQDGMLKNKNTYEIMTPESIGLKNQALNLTSRSGRAAVKSHMDTMGYKEEEYNLDALYEDFLKLADRKGQVFDYDLEALMHFSNLREEDDFYKLNYLSVQSGSVMATTSVKMQCGDKEMCEAAVGNGPVDALYQCIYRVTGYDIVLDKFDLTAKGEGEDGLGQADIIANYKGRKYHGTGVSTDIVEASGQALLHVINSIHRADTIAEMKQNKIAAV

SEQ ID NO: 332 - protein, 505 aa, Dehalococcoides sp. VS
MDKIKIFDTTLRDGEQAAGASLNAQEKLEIARQLEKLGVDIIEAGFPITSPGDFEAVKLIAQEVRTTVICGLARAIPADIDRAWEALKEAAHPRIHVFISSSEIHMVHQIKKSREEVMELARTMVARAKSYTDDIEFSPMDASRSDPEFLYKLLEAVIDAGATTLNIPDTVGYAIPSEFGELIKGIRQNVPNINKAVISVHCHDDLGMGTANSLAAVKNGARQVECTLNGIGERAGNAALEEVVMALRTRSDFFNFETGINTQEIYRSSRLVSALTGFAIQPNKAVVGENAFRHQSGIHQDGVIKMAKTFEIMDPKEVGIQASSLVLGKLSGRHAFKQHLTELGFDLNEEDFDRAFKAFKDLADKKKDVTDRDIEALVAEELRTTVELYHLDRIQVTSGDRGIPTAAVRLTTPNGEAAEDAALGSGPVDAVYKAINRIVNVPNKLTEFSVKSVTAGIDALGEVLIRIESDGVTYTGRGSDTDIIVASAKAYMNALNRLLRVKNAS

SEQ ID NO: 333 - protein, 534 aa, Dehalococcoides sp. VS
MNESPGPVASISDAPQHVTIFDTSLRDGEQSPGCSMSASQKLRFAHALSELGVDVIEAGFPASSEADLEGVRAIVREVRASSLATLARCHPGDIEACARALEGAAKPRIHVFISTSPLHRQHKLNLDRQQVLERAVAAVEQARRYVDDVEFSCEDALRTEPEYLVEICSAAIAAGARTLNIPDTVGYTTPSEIRSLFEYLRSNVRDAEKAVFSAHCHNDLGLAVANSLAAIEGGARQVECTINGIGERAGNCALEELVMALRVRNAYYNASTRIDTRRLVPTSRLLSRITGMVVQRNKAVVGQNAFAHESGIHQHGMLKHRGTYEIMAPEDVGWAQSQMVMARHSGRAALNDRLQALGFSVDEARLNSVFAAFKTLAEKKREVFDADLEALVLGADAKAARGYRLVRAHVSTGVADGSLPTASVQLVDPDGATISEAAVGDGPVHALFAALARATGLRLAIDSYNVSSVTTGDDAQGQASLTARVDGVELTGSGTSTDIIEASALAWLELANRLVRTQRQTEPATQPRKVAATA

SEQ ID NO: 334 - protein, 239 aa, Medicago truncatula
MGRGKIVIRRIDNCTSRQVTFSKRRKGLIKKAKELAILCDAQVGLVIFSSTGKLYEYANTSMKSVIERYNICKEDQQVTNPESEVKFWQREADILRQQLQSLQENHRQLMGEQLYGLSIRNLQDLESQLELSLQGVRMKKEKILTDEIQELNRKGSIIHQENVELYKKVNLLQQENTQLHKKVYGTTDNEATATSKNAFVQFPYSVRGGGEYPQTLFQLQLCQPEQEYCETSGSASATK

SEQ ID NO: 335 - protein, 737 aa, Gossypium arboreum
MTVRATKRGRKMYTDCEAISSMGGNLVVSSETLFTSTFQNPNFTYLPLEPLPPMIPKEENGSLLRGKEEMKSGSESELQETTEQPLKKKRYHRHTAHQIQELEAVFKECPHPDDKQRMKLSQELGLKPRQVKFWFQNRRTQMKAQQDRSENVILRAENDSLKSEFYRLQAELSKLVCPNCGGPPVPGGVSFDELRIENARLGEELERVCAIASRYIGRPIQTMGALMPPSLELDMNIYPRQFLEPMPPPILSETPSYPDNNNLILMEEEKTIAMELAMSATDELVKMCRTNEPLWVRNDETGKEVLNLDEHIRMFHWPLNLKQRSSEFRTEASRDSSVVIMNSITLVDAFVDANKWMELFPSLVARAKCVQVLSQGVSGTNGCLQLMYAELHVLSPLVPTREAYFLRYCQQQNVEDETYWAIVDFPLDGFHNSLQTSFPLYKRRPSGCLIQDMPNGYSRVTWVEHSEIEEKPIHQIFSHFVHSGMAFGANCWLAVLERQCERIASLMATNIPDIGVIPSPDARKNIMRLSQRMIRTFCVNISSCSGQVWTAVPDSSDDTVIITTRKVSEAGQPNGLILCAVSTTWLPYPHHHVFDLLRDERRRAQLEVLSNWNALHEVAHIVNGSHPGNCISLLRINVASNSSQHVDLMLQESCADKSGSLVVYSTVDVDSVQLAMSGEDPSCIPLLPLGFFITPMELLNDGGCKDEANEHNITTGSLLTVGLQVLASTIPSAKINR

SEQ ID NO: 336 - protein, 193 aa, Arabidopsis lyrata
SYTPGDTQTGPVISVPESEKIMNAYRFPNNNNNEMIKKKRLTSGQLASLERSFQEEIKLDSDRKVKLSRELGLQPRQIAVWFQNRRARWKAKQLEQLYDSLRQEYDVVSREKQMLHEEVKKLRAILRDQGLIKKQISAGTIKVSGEEDTTEVSSVVVAHPRTENLNTNQITGGNQVYGQYNNPMLVASSGWLS

SEQ ID NO: 337 - protein, 187 aa, Arabidopsis halleri
YGDEDAGVSSPNSTVSSSTGKRSEREEDTDPQGSRGISDDEDGDNSRKKLRLSKDQSVILEETFKDHSTLNPKQKQALAKQLGLRARQVEVWFQNRRARTKLKQTEVDCEFLRRCCENLTEENRRLQKEVTELRALKLSPQFYMHMSPPTTLTMCPSCEHVSVPPPQPQAATSADHRSLPVNAWAPA

SEQ ID NO: 338 - protein, 185 aa, Arabidopsis halleri
YGDEDAGVSSPNSTISSSTGKRSEREEDTDPQGSRGISDDEDGDNSRKKLRLSKDQSVILEETFKDHSTLNPKQKQALAKQLGLRARQVEVWFQNRRARTKLKQTEVDCEFLRRCCENLTEENRRLQKEVTELRALKLSPQFYMHMSPPTTLTMCPSCEHVSVPPPQPQAATSADHRSLPVNAWA

SEQ ID NO: 339 - protein, 184 aa, Arabidopsis halleri
YGDEDAGVSSPNSTVSSSTGKRSEREEDTDPQGSRGISDDEDGDNSRKKLRLSKDQSVILEETFKDHSTLNPKQKQALAKQLGLRARQVEVWFQNRRARTKLKQTEVDCEFLRRCCENLTEENRRLQKEVTELRALKLSPQFYMHMSPPTTLTMCPSCEHVSVPPPQPQAATSADHRSLPVNAW

SEQ ID NO: 340 - protein, 187 aa, Arabidopsis halleri
YGDEDAGVSSPNSTISSSTGKRSEREEDTDPQGSRGISDDEDGDNSRKKLRLSKDQSVILEETFKDHSTLNPKQKQALAKQLGLRARQVEVWFQNRRARTKLKQTEVDCEFLRRCCENLTEENRRLQKEVTELRALKLSPQFYMHMSPPTTLTMCPSCEHVSVPPPQPQAATSADHRSLPVNAWAPA

SEQ ID NO: 341 - protein, 187 aa, Arabidopsis halleri
YGDEDAGVSSPDSTVSSSTGKRSEREEDTDPQGSRGISDDDDGDNSRKKLRLSKDQSVILEETFKDHSTLNPKQKQALAKQLGLRARQVEVWFQNRRARTKLKQTEVDCEFLRRCCENLTEENRRLQKEVTELRALKLSPQFYMHMSPPTTLTMCPSCEHVSVPPPQPQAATSADHRSLPVNAWAPA

SEQ ID NO: 342 - protein, 187 aa, Arabidopsis halleri
YGDEDAGVSSPNSTVSSSTGKRSEREEDTDPQGSRGISDDDDGDNSRKKLRLSKDQSVILEETFKDHSTLNPKQKQALAKQLGLRARQVEVWFQNRRARTKLKQTEVDCEFLRRCCENLTEENRRLQKEVTELRALKLSPQFYMHMSPPTTLTMCPSCEHVSVPPPQPQAATSADHRSLPVNAWAPA

SEQ ID NO: 343 - protein, 185 aa, Arabidopsis halleri
YGDEDAGVSSPNSTVSSSTGKRSEREEDTDPQGSRGISDDEDGDNSRKKLRLSKDQSVILEETFKDHSTLNPKQKQALAKQLGLRARQVEVWFQNRRARTKLKQTEVDCEFLRRCCENLTEENRRLQKEVTELRALKLSPQFYMHMSPPTTLTMCPSCEHVSVPPPQPQAATSADHRSLPVNAWA

SEQ ID NO: 344 - protein, 187 aa, Arabidopsis halleri
YGDEDAGVSSPNSTVSSSTGKRSEREEDTDPQGSRGISDDEDGDNSRKKLRLSKDQSVILEETFKDHSTLNPKQKQALAKQLGLRARQVEVWFQNRRARTKLKQTEVDCEFLRRCCENLTEENRRLQKEVTELRALKLSPQFYMHMSPPTTLTKCPSCEHVSVPPPQPQAATSADHRSLPVNAWAPA

SEQ ID NO: 345 - protein, 186 aa, Arabidopsis halleri
YGDEDAGVSSPNSTVSSSTGKRSEREEDTDPQGSRGISDDEDGDNSRKKLRLSKDQSVILEETFKDHSTLNPKQKQALAKQLGLRARQVEVWFQNRRARTKLKQTEVDCEFLRRCCENLTEENRRLQKEVTELRALKLSPQFYMHMSPPTTLTMCPSCEHVSVPPPQPQAATSADHRSLPVNAWAP

SEQ ID NO: 346 - protein, 523 aa, Salmonella enterica subsp. enterica serovar Typhi str. CT18
MSQQVIIFDTTLRDGEQALQASLSAKEKLQIALALERMGVDVMEVGFPVSSPGDFESVQTIARTIKNSRVCALARCVEKDIDVAAQALKVADAFRIHTFIATSPMHIATKLRSTLDEVIERAVYMVKRARNYTDDVEFSCEDAGRTPVDDLARVVEAAINAGARTINIPDTVGYTMPFEFAGIISGLYERVPNIDKAIISVHTHDDLGIAVGNSLAAVHAGARQVEGAMNGIGERAGNCALEEVIMAIKVRKDIINVHTNINHHEIWRTSQTVSQICNMPIPANKAIVGSGAFAHSSGIHQDGVLKNRENYEIMTPESIGLNQIQLNLTSRSGRAAVKHRMEEMGYKDTDYNMGHLYDAFLKLADKKGQVFDYDLEALAFINKQQEEPEHFRLDYFSVQSGSSDIATASVKLACGEEIKAEAANGNGPVDAIYQAINRITGYDVELVKYDLNAKGQGKDALGQVDIVVNHHGRRFHGVGLATDIVESSAKAMVHVLNNIWRAAEVEKELQRKAQNKENNKETV

SEQ ID NO: 347 - protein, 523 aa, Salmonella typhimurium LT2
MSQQVIIFDTTLRDGEQALQASLSAKEKLQIALALERMGVDVMEVGFPVSSPGDFESVQTIARTIKNSRVCALARCVEKDIDVAAQALKVADAFRIHTFIATSPMHIATKLRSTLDEVIERAVYMVKRARNYTDDVEFSCEDAGRTPVDDLARVVEAAINAGARTINIPDTVGYTMPFEFAGIISGLYERVPNIDKAIISVHTHDDLGIAVGNSLAAVHAGARQVEGAMNGIGERAGNCALEEVIMAIKVRKDIMNVHTNINHHEIWRTSQTVSQICNMPIPANKAIVGSGAFAHSSGIHQDGVLKNRENYEIMTPESIGLNQIQLNLTSRSGRAAVKHRMEEMGYKDTDYNMDHLYDAFLKLADKKGQVFDYDLEALAFINKQQEEPEHFRLDYFSVQSGSSDIATASVKLACGEEIKAEAANGNGPVDAIYQAINRITGYDVELVKYDLNAKGQGKDALGQVDIVVNHHGRRFHGVGLATDIVESSAKAMVHVLNNIWRAAEVEKELQRKAQNKENNKETV

SEQ ID NO: 348 - protein, 512 aa, Listeria innocua Clip11262
MKKIQFFDTTLRDGEQTPGVNFDVKEKIQIALQLEKLGIDVIEAGFPISSPGDFECVKAIAKAIKHCSVTGLARCVEADIDRAEEALKDAVSPQIHIFLATSDVHMEYKLKMSRAEVLASIKHHISYARQKFDVVQFSPEDATRSDRAFLIEAVQTAIDAGATVINIPDTVGYTNPTEFGQLFQDLRREIKQFDDIIFASHCHDDLGMATANALAAIENGARRVEGTINGIGERAGNTALEEVAVALHIRKDFYQAETNIVLNQFKNSSDLISRLSGMPVPRNKAVIGGNAYAHESGIHQDGVLKNPDTYEIITPALVGVDKNSLPLGKLSGKHAFNTRMEEMGYTLSEQEQKDAFKRFKQLADAKKDVTEEDLHALILGQSSESHDAFELKHLQVQYVTGGVQGAIVRIEERDGALIEDAATGSGSIEAIYNTINRLMKQDIELTDYRIQAITAGQDAQAEVHVVIKDDNGTEFHGIGIDFDVLTASAKAYLQASGKSKSTSKQADFEEVK

SEQ ID NO: 349 - protein, 616 aa, Physcomitrella patens subsp. patens
MCQPVVRKSQVSSSGLSSTFVVPFSGGRNGVRSTKTREVAPGAFIQCQGAQHKKRPQYIPNRIDDPSYVRIFDTTLRDGEQSPGATMTSKEKLDIARQLARLGVDIIEAGFPIASPDDLEAVRLIAKEVGNNVDDDGYVPVICGLSRCNKKDIDAAWEAVKYAVRPRIHTFIATSEIHMVHKLKKSPEEVVQIARDMVAYARSLGCEDIEFSPEDAGRSDPEFLYRILEEVIKAGATTLNIPDTVGYTLPSEFGGLIAKLKANTPGADKVIFSTHCQNDLGLATANTLAGAHAGARQVEVTINGIGERAGNASLEEVVMALRCRGQERLGGLYTGLNTKHIAVASRMVADYTGMVVQPHKAIVGANAFAHESGIHQDGMLKHKGTYEILSPDDIGLVRADASGIVLGKLSGRHALKQRLNQLGYEVDGQELDDVFKRFKAVAEKKKNVSNEDLETLLFDEVFQPETLWSLGLIQVVCGNAGISTATVKLEGPDGAQHIGMSVGTGPVDAAYKAVDTIVKAPVTLLEYSLNSVTEGIDALAHTRVQIRALDSLTVTHAQTDSQVPRTYSGTGASEDVVVSSCRAYISALNKMLTFRAAKKQPIVGLRSEEQTAGVSQ

SEQ ID NO: 350 - protein, 715 aa, Physcomitrella patens subsp. patens
MAMALNGSQVQSGISSSGTQAPENCWSSTSWEHQNLTDSSSMEGSGEGDYVGSGRMEWDLKANSWEWPENLTMVYPRQGDGNQRLHNNDWPASAACSAVTLATTSAGASDFSIGLASGSSTISGTLSVSSGIPGVSAGRGSCGADLSSVVKSEPDEHGMERTVVGTPATLSGHKDRLLFDLGGVQSRGNGEKFSEKNESARAAGDQSNGSSVVSGGGDSLNIGLKLGRRTYFEDSFGGGQAKGSSSPAPSPPGKKQRVVAPNVQIARCQVEGCKADLSGCKDYHKRHKVCEMHSKAPKCIAAGIEQRFCQQCSRFHVLTEFDEGKRSCRRRLAGHNERRRKPHPETHSVFGLRNSSSLYSDTSTLTMDAAPFYFLDSKRTSFLHRHGGSSLEDEFHPYSDSLKRTNPWSTLRRDYSNLACQFQLSLNVLISDPAFVADDGHLQAASAERQSIFSTLSRPTADRLLSLLQNPKTQMPAPNTSTGMNLGGHHFLEGPVGPLGQGLSLSSSTGGALGSLEQSRIDSCSQSLSSVSGLTNTGRALSLLSSQSWASRPPPGASAPVSLGLSQAYDSTLEQLVASSSDSSNRGSRFSHHLQLPSGGSSSSSQQQFEKQFSVQARDLESVGLNCGLTATGNGNILASLGGGYEETNSMLALVQAGQDIQALNSGSSHHARPTIDLMQMPSSHSNGLHSQVSGGQYNGFSALRPFESSIFSTQ

SEQ ID NO: 351 - protein, 512 aa, Listeria monocytogenes EGD-e
MKKIQFFDTTLRDGEQTPGVNFDVKEKIQIALQLEKLGIDVIEAGFPISSPGDFECVKAIAKAIKHCSVTGLARCVEGDIDRAEEALKDAVSPQIHIFLATSDVHMEYKLKMSRAEVLASIKHHISYARQKFEVVQFSPEDATRSDRAFLIEAVQTAIDAGATVINIPDTVGYTNPTEFGQLFQDLRREIKQFDDITFASHCHDDLGMATANALAAIENGARRVEGTINGIGERAGNTALEEVAVALHIRKDFYQAETNIVLNQFKNSSDLISRLSGMPVPRNKAVIGGNAYAHESGIHQDGVLKNPDTYEIITPALVGVDKNSLPLGKLSGKHAFNTRMEEMGYTLTEQEQKDAFKRFKQLADAKKEVTEEDLHALILGQSSESADDFELKHLQVQYVTGGVQGAIVRIEERDGALVEDAATGSGSIEAIYNTINRLMKQDIELTDYRIQAITAGQDAQAEVHVVIKNDKGAEFHGIGIDFDVLTASAKAYLQASGKSKTASKQADFEEVK

SEQ ID NO: 352 - protein, 583 aa, Physcomitrella patens subsp. patens
MKAGEVARGALIQCNGSALRKRPQYVPNRIDDPAYVRIFDTTLRDGEQSPGATMTSKEKLDIARQLARLGVDIIEAGFPIASPDDLEAVRLIAKEVGNQVDEDGYVPVICGLSRCNKKDIDAAWEAVKYAVRPRIHTFIATSEIHMVHKLKKTPDQVVQIARDMVAYARSLGCEDIEFSPEDAGRSDPEFLYRILAEVIKAGATTLNIPDTVGYTLPSEFGSLIGKLKANTPGAEKVIFSTHCQNDLGLATANTLAGAHAGARQVEVTINGIGERAGNASLEEVVMALRCRGQEQLGGLFTGLNTKHIAVASRMVADYTGMVVQPHKAIVGANAFAHESGIHQDGMLKHKGTYEILAPEDIGLVRADASGIVLGKLSGRHALKQRLNQLGYEIDGQDLDDVFKRFKAVAEKKKNVSDDDLEILLSDEVFQPETLWSVGLIQVVCGTSGLSTATVKLVGPDGVEHIGMSVGTGPVDAAYKAVDTIVKAPVTLLEYSMHAVTEGIDAIAHTRVQIRALDPLTVTNPQTGSQVPRSYSGTGAAEDVVVSSVRAYISALNKMLTFRVAKHHAKGANRSEVHAAGVSS

SEQ ID NO: 353 - protein, 699 aa, Physcomitrella patens subsp. patens
MSQQYMAMAVNGSHVHSGISSSGPQAPENCWSSTSWEHQNLTDSSSMEGSGGVDYVGSGRMEWDLKANSWEWENLTMVYPQQGEGNQRLHNNDWPVSAACSAVTLATTSAGASDFSIGLASGSSTPSGALSVSSGIPGVSAGRGSCGADLSSLVKSEPDENGAERTVLGTPATLNGHKHRLLFDLGGVQSRGNGERSPEKDDNTRAAAVPSNGSSAVSGAGDSLNIGLKLGRRTYFEDSTGVGHAKGLSSPAPSPPGKKQRVVAPSMQIARCQVEGCKADLSGCKDYHKRHKVCEMHSKAPKCIAAGIEQRFCQQCSRFHVLTEFDEGKRSCRRRLAGHNERRRKPHPETHSVFGLRNSSPLYSDSSTLTMDSAPFYFLDSKRSSILHRHRGSSLDDELHSYSDTLKRTNPWSTLRRDENSLACQLQAASAERQSIFSTLSRPTADRLLSLLQNPKSQMPAPNTSTGMNLGNHHFLEGPLGPLGQGLSLSSSTGGVLGSLEQSRVGSCSQSLSSVSGLANSGRALSLLSSQSWASRPTQGASAPVSLGLSQADDSTLEQLVASSSDCSNRGSRFSHHLQLPCGGSSTSAQQQFDKQLSIQSGGLESVGLNCGLAATGNGNILSGLGGGYDETNSILALVQAGQDIQALNSGSSHHARPTIDLMQMPSSHSNGLHSQVSGSQCSGFNALRPFESSVFSTQ

SEQ ID NO: 354 - protein, 528 aa, Gemmata obscuriglobus UQM 2246
MSVPADPNRVIIFDTTLRDGEQSPGCSMNLAEKLEMARALADLGVDVIEAGFPIASPGDFESVQAIARQIHGPVIAGLARCNPTDIDRAADAVKDAEKPRIHVFLATSAIHREFKLKMTSEEVARRAVEGVKRARDRCADIEFSPEDAARTELDFLAEVVERVIEAGATTLNIPDTVGYAVPQHYAAIIRHLKKNVRGIDNCVLSVHCHNDLGLAVANSLAALGEGARQVECTINGIGERAGNTSLEEVVMALHTRRDYYGLTTGINTRHLYPVSRKLSHVTGQTVQRNKAIVGQNAFAHEAGIHQDGMLKERSTYEIMRPEDVGIPQTELVLGKHSGRHALKQRVAALGYGLSDEQLNKVFEEFKKLADKKKEIYDADIEALAENQLQEGTGNLWTLVGFTSTAGTGSQTSAAVTLKHLDGSVRRDAAVGNGPIDALFKAINRVTGAAVRVVDYRVRSVSQDMDALGEASIEIEYSGKKSRARAVSVDVVEASALAYLEVVNRVASRQLRDRLKPTDNVPTEAVPAG

SEQ ID NO: 355 - protein, 490 aa, Coprinopsis cinerea okayama7#130
MCPHATGDSLPADKSEMVAIPLNGESSTSTTNGTNGAPAYGVNKQGIKKRGTWRAPDAHLNREVKNPYAARASDLLSNLSNFNIIESTLREGEQFANAFFDTKTKIAIAKALDAFGVEYIELTSPCASEQSRADCEAICKLGLKAKILTHIRCHMDDARVAVETGVDGVDVVIGTSSYLREFSHGKDMAYITKTAIEVIEFVKSKGIEVRFSSEDSFRSDLVDLLSIYQTVDKIGVNRVGIADTVGCANPRQVYDLVRTLRGVVSCDIEVHLHNDTGMAIANAYTALEAGATHIDTSVLGIGERVGITPLGGLVACLYAANPEYVKSKYNLPMLREIENLVAEAVEVNIPFMNPITGYCAFTHKAGIHAKAILNNPSTYEILKPEDFGLTRYVSIGHRLTGWNAVKSRVEQLGLQLTDAEVKDVTAKIKELADVRTQSMDDVDTLLRVYHSGIQSGELAVGQKEALDRLLRRHKAEAQGRAASPSVERSD

SEQ ID NO: 356 - protein, 422 aa, Xylella fastidiosa
ETGFPASSQSDYEAMTLIARELRRPTLAVLSRCLQADIETSARALESATKPRLHVFLSTSPLHREHKLRMSKEQVLESVHKHVSLSRTLIDDVEFSAEDATRTEEDFLIEVTRVAIAAGATTINLPDTVGFSTPEEIRNMFTRIIANVEGANKVIFSAHCHDDLGLAVANSLAAIEGGARQIECTINGIGERAGNCALEELTMVLKVRNAFYNIDTSIHTSRIVSTSQLLQRLVGMPVQRNKAVVGANAFAHESGIHQHGMLRHRGTYEIMRPQEVGWVCSHMVLGRHSGRAAVEQRLRALGYLLEEEDLKLVFEEFKQLCEKQRLVTDVDLQVLMQDTTVQHGYRLASMTISDIGNRANALVELSDPQGQRVAETAQGNGPVDALFGALAAATGVKLELDSYQVHSVGIGADARGEANLSV

SEQ ID NO: 357 - protein, 421 aa, Xylella fastidiosa
ETGFPASSQSDYEAMTLIARELRRPTLAVLSRCLQADIETSARALESATKPRLHVFLSTSPLHREHKLRMSKEQVLESVHKHVSLSRTLIDDVEFSAEDATRTEEDFLIEVTRVAIAAGATTINLPDTVGFSTPEEIRNMFTRIIANVEGANKVIFSAHCHDDLGLAVANSLAAIEGGARQIECTINGIGERAGNCALEELTMVLKVRNAFYNIDTSIHTSRIVSTSQLLQRLVGMPVQRNKAVVGANAFAHESGIHQHGMLRHRGTYEIMRPQEVGWVCSHMVLGRHSGRAAVEQRLRALGYLLEEEDLKLVFEEFKQLCEKQRLVTDVDLQVLMQDTTVQHGYRLASMTISDIGNRANALVELSDPQGQRVAETAQGNGPVDALFGALAAATGVKLELDSYQVHSVGIGADARGEANLS

SEQ ID NO: 358 - protein, 418 aa, Xylella fastidiosa
TGFPASSQSDYEAMTLIARELRRPTLAVLSRCLQADIETSARALESATKPRLHVFLSTSPLHREHKLRMSKEQVLESVHKHVSLSRTLIDDVEFSAEDATRTEEDFLIEVTRVAIAAGATTINLPDTVGFSTPEEIRNMFTRIIANVEGANKVIFSAHCHDDLGLAVANSLAAIEGGARQIECTINGIGERAGNCALEELTMVLKVRNAFYNIDTSIHTSRIVSTSQLLQRLVGMPVQRNKAVVGANAFAHESGIHQHGMLRHRGTYEIMRPQEVGWACSHMVLGRHSGRAAVEQRLRALGYLLEEEDLKLVFEEFKQLCEKQRLVTDVDLQVLMQDTTVQHGYRLASMTISDVGNRANALVELSDPQGQRVAETAQGNGPVDALFGALAAATGVKLELDSYQVHSVGIGADARGEAN

SEQ ID NO: 359 - protein, 419 aa, Xylella fastidiosa
TGFPASSQSDYEAMTLIARELRRPTLAVLSRCLQADIETSARALESATKPRLHVFLSTSPLHREHKLRMSKEQVLESVHKHVSLSRTLIDDVEFSAEDATRTEEDFLIEVTRVAIAAGATTINLPDTVGFSTPEEIRNMFTRIIANVEGANKVIFSAHCHDDLGLAVANSLAAIEGGARQIECTINGIGERAGNCALEELTMVLKVRNAFYNIDTSIHTSRIVSTSQLLQRLVGMPVQRNKAVVGANAFAHESGIHQHGMLRHRGTYEIMRPQEVGWVCSHMVLGRHSGRAAVEQRLRALGYLLEEEDLKLVFEEFKQLCEKQRLVTDVDLQVLMQDTTVQHGYRLASMTISDIGNRANALVELSDPQGQRVAETAQGNGPVDALFGALAAATGVKLELDSYQVHSVGIGADARGEANL

SEQ ID NO: 360 - protein, 405 aa, Xylella fastidiosa
TLIARELRRPTLAVLSRCLQADIETSARALESATKPRLHVFLSTSPLHREHKLRMSKEQVLESVHKHVSLSRTLIDDVEFSAEDATRTEEDFLIEVTRVAIAAGATTINLPDTVGFSTPEEIRNMFTRIIANVEGANKVIFSAHCHDDLGLAVANSLAAIEGGARQIECTINGIGERAGNCALEELTMVLKVRNAFYNIDTSIHTSRIVSTSQLLQRLVGMPVQRNKAVVGANAFAHESGIHQHGMLRHRGTYEIMRPQEVGWVCSHMVLGRHSGRAAVEQRLRALGYLLEEEDLKLVFEEFKQLCEKQRLVTDVDLQVLMQDTTVQHGYRLASMTISDIGNRANALVELSDPQGQRVAETAQGNGPVDALFGALAAATGVKLELDSYQVHSVGIGADARGEANL

SEQ ID NO: 361 - protein, 407 aa, Xylella fastidiosa
TGFPASSQSDYEAMTLIARELRRPTLAVLSRCLQADIETSARALESATKPRLHVFLSTSPLHREHKLRMSKEQVLESVHKHVSLSRTLIDDVEFSAEDATRTEEDFLIEVTRVAIAAGATTINLPDTVGFSTPEEIRNMFTRIIANVEGANKVIFSAHCHDDLGLAVANSLAAIEGGARQIECTINGIGERAGNCALEELTMVLKVRNAFYNIDTSIHTSRIVSTSQLLQRLVGMPVQRNKAVVGANAFAHESGIHQHGMLRHRGTYEIMRPQEVGWVCSHMVLGRHSGRAAVEQRLRALGYLLEEEDLKLVFEEFKQLCEKQRLVTDVDLQVLMQDTTVQHGYRLASMTISDIGNRANALVELSDPQGQRVAETAQGNGPVDALFGALAAATGVKLELDSYQVHSV

SEQ ID NO: 362 - protein, 419 aa, Xylella fastidiosa
TGFPASSQSDYEAMTLIARELRRPTLAVLSRCLQADIETSARALESATKPRLHVFLSTSPLHREHKLRMSKEQVLESVHKHVSLSRTLIDDVEFSAEDATRTEEDFLIEVTRVAIAAGATTINLPDTVGFSTPEEIRNMFTRIIANVEGANKVIFSAHCHDDLGLAVANSLAAIEGGARQIECTINGIGERAGNCALEELTMVLKVRNAFYNIDTSIHTSRIVSTSQLLQRLVGMPVQRNKAVVGANAFAHESGIHQHGMLRHRGTYEIMRPQEVGWACSHMVLGRHSGRAAVEQRLRALGYLLEEEDLKLVFEEFKQLCEKQRLVTDVDLQVLMQDTTVQHGYRLASMTISDVGNRANALVELSDPQGQRVAETAQGNGPVDALFGALAAATGVKLELDSYQVHSVGIGADARGEANL

SEQ ID NO: 363 - protein, 420 aa, Xylella fastidiosa
ETGFPASSQSDYEAMTLIARELRRPTLAVLSRCLQADIETSARALESATKPRLHVFLSTSPLHREHKLRMSKEQVLESVHKHVSLSRTLIDDVEFSAEDATRTEEDFLIEVTRVAIAAGATTINLPDTVGFSTPEEIRNMFTRIIANVEGANKVIFSAHCHDDLGLAVANSLAAIEGGARQIECTINGIGERAGNCALEELTMVLKVRNAFYNIDTSIHTSRIVSTSQLLQRLVGMPVQRNKAVVGANAFAHESGIHQHGMLRHRGTYEIMRPQEVGWVCSHMVLGRHSGRAAVEQRLRALGYLLEEEDLKLVFEEFKQLCEKQRLVTDVDLQVLMQDTTVQHGYRLASMTISDIGNRANALVELSDPQGQRVAETAQGNGPVDALFGALAAATGVKLELDSYQVHSVGIGADARGEANL

SEQ ID NO: 364 - protein, 420 aa, Xylella fastidiosa
TGFPASSQSDYEAMTLIARELRRPTLAVLSRCLQADIETSARALESATKPRLHVFLSTSPLHREHKLRMSKEQVLESVHKHVSLSRTLIDDVEFSAEDATRTEEDFLIEVTRVAIAAGATTINLPDTVGFSTPEEIRNMFTRIIANVEGANKVIFSAHCHDDLGLAVANSLAAIEGGARQIECTINGIGERAGNCALEELTMVLKVRNAFYNIDTSIHTSRIVSTSQLLQRLVGMPVQRNKAVVGANAFAHESGIHQHGMLRHRGTYEIMRPQEVGWVCSHMVLGRHSGRAAVEQRLRALGYLLEEEDLKLVFEEFKQLCEKQRLVTDVDLQVLMQDTTVQHGYRLASMTISDIGNRANALVELSDPQGQRVAETAQGNGPVDALFGALAAATGVKLELDSYQVHSVGIGADARGEANLS

SEQ ID NO: 365 - protein, 421 aa, Xylella fastidiosa
TGFPASSQSDYEAMTLIARELRRPTLAVLSRCLQADIETSARALESATKPRLHVFLSTSPLHREHKLRMSKEQVLESVHKHVSLSRTLIDDVEFSAEDATRTEEDFLIEVTRVAIAAGATTINLPDTVGFSTPEEIRNMFTRIIANVEGANKVIFSAHCHDDLGLAVANSLAAIEGGARQIECTINGIGERAGNCALEELTMVLKVRNAFYNIDTSIHTSRIVSTSQLLQRLVGMPVQRNKAVVGANAFAHESGIHQHGMLRHRGTYEIMRPQEVGWACSHMVLGRHSGRAAVEQRLRALGYLLEEEDLKLVFEEFKQLCEKQRLVTDVDLQVLMQDTTVQHGYRLASMTISDVGNRANALVELSDPQGQRVAETAQGNGPVDALFGALAAATGVKLELDSYQVHSVGIGADARGEANLSV

SEQ ID NO: 366 - protein, 421 aa, Xylella fastidiosa
TGFPASSQSDYEAMTLIARELRRPTLAVLSRCLQADIETSARALESATKPRLHVFLSTSPLHREHKLRMSKEQVLESVHKHVSLSRTLIDDVEFSAEDATRTEEDFLIEVTRVAIAAGATTINLPDTVGFSTPEEIRNMFTRIIANVEGANKVIFSAHCHDDLGLAVANSLAAIEGGARQIECTINGIGERAGNCALEELTMVLKVRNAFYNIDTSIHTSRIVSTSQLLQRLVGMPVQRNKAVVGANAFAHESGIHQHGMLRHRGTYEIMRPQEVGWVCSHMVLGRHSGRAAVEQRLRALGYLLEEEDLKLVFEEFKQLCEKQRLVTDVDLQVLMQDTTVQHGYRLASMTISDIGNRANALVELSDPQGQRVAETAQGNGPVDALFGALAAATGVKLELDSYQVHSVGIGADARGEANLSV

SEQ ID NO: 367 - protein, 420 aa, Xylella fastidiosa
GFPASSQSDYEAMTLIARELRRPTLAVLSRCLQADIETSARALESATKPRLHVFLSTSPLHREHKLRMSKEQVLESVHKHVSLSRTLIDDVEFSAEDATRTEEDFLIEVTRVAIAAGATTINLPDTVGFSTPEEIRNMFTRIIANVEGANKVIFSAHCHDDLGLAVANSLAAIEGGARQIECTINGIGERAGNCALEELTMVLKVRNAFYNIDTSIHTSRIVSTSQLLQRLVGMPVQRNKAVVGANAFAHESGIHQHGMLRHRGTYEIMRPQEVGWVCSHMVLGRHSGRAAVEQRLRALGYLLEEEDLKLVFEEFKQLCEKQRLVTDVDLQVLMQDTTVQHGYRLASMTISDIGNRANALVELSDPQGQRVAETAQGNGPVDALFGALAAATGVKLELDSYQVHSVGIGADARGEANLSV

SEQ ID NO: 368 - protein, 418 aa, Xylella fastidiosa
PASSQSDYEAMTLIARELRRPTLAVLSRCLQADIETSARALESATKPRLHVFLSTSPLHREHKLRMSKEQVLESVHKHVSLSRTLIDDVEFSAEDATRTEEDFLIEVTRVAIAAGATTINLPDTVGFSTPEEIRNMFTRIIANVEGANKVIFSAHCHDDLGLAVANSLAAIEGGARQIECTINGIGERAGNCALEELTMVLKVRNAFYNIDTSIHTSRIVSTSQLLQRLVGMPVQRNKAVVGANAFAHESGIHQHGMLRHRGTYEIMRPQEVGWVCSHMVLGRHSGRAAVEQRLRALGYLLEEEDLKLVFEEFKQLCEKQRLVTDVDLQVLMQDTTVQHGYRLASMTISDIGNRANALVELSDPQGQRVAETAQGNGPVDALFGALAAATGVKLELDSYQVHSVGIGADARGEANLSV

SEQ ID NO: 369 - protein, 419 aa, Xylella fastidiosa
FPASSQSDYEAMTLIARELRRPTLAVLSRCLQADIETSARALESATKPRLHVFLSTSPLHREHKLRMSKEQVLESVHKHVSLSRTLIDDVEFSAEDATRTEEDFLIEVTRVAIAAGATTINLPDTVGFSTPEEIRNMFTRIIANVEGANKVIFSAHCHDDLGLAVANSLAAIEGGARQIECTINGIGERAGNCALEELTMVLKVRNAFYNIDTSIHTSRIVSTSQLLQRLVGMPVQRNKAVVGANAFAHESGIHQHGMLRHRGTYEIMRPQEVGWVCSHMVLGRHSGRAAVEQRLRALGYLLEEEDLKLVFEEFKQLCEKQRLVTDVDLQVLMQDTTVQHGYRLASMTISDIGNRANALVELSDPQGQRVAETAQGNGPVDALFGALAAATGVKLELDSYQVHSVGIGADARGEANLSV

SEQ ID NO: 370 - protein, 406 aa, Xylella fastidiosa
TLIARELRRPTLAVLSRCLQADIETSARALESATKPRLHVFLSTSPLHREHKLRMSKEQVLESVHKHVSLSRTLIDDVEFSAEDATRTEEDFLIEVTRVAIAAGATTINLPDTVGFSTPEEIRNMFTRIIANVEGANKVIFSAHCHDDLGLAVANSLAAIEGGARQIECTINGIGERAGNCALEELTMVLKVRNAFYNIDTSIHTSRIVSTSQLLQRLVGMPVQRNKAVVGANAFAHESGIHQHGMLRHRGTYEIMRPQEVGWVCSHMVLGRHSGRAAVEQRLRALGYLLEEEDLKLVFEEFKQLCEKQRLVTDVDLQVLMQDTTVQHGYRLASMTISDIGNRANALVELSDPQGQRVAETAQGNGPVDALFGALAAATGVKLELDSYQVHSVGIGADARGEANLS

SEQ ID NO: 371 - protein, 407 aa, Xylella fastidiosa
TLIARELRRPTLAVLSRCLQADIETSARALESATKPRLHVFLSTSPLHREHKLRMSKEQVLESVHKHVSLSRTLIDDVEFSAEDATRTEEDFLIEVTRVAIAAGATTINLPDTVGFSTPEEIRNMFTRIIANVEGANKVIFSAHCHDDLGLAVANSLAAIEGGARQIECTINGIGERAGNCALEELTMVLKVRNAFYNIDTSIHTSRIVSTSQLLQRLVGMPVQRNKAVVGANAFAHESGIHQHGMLRHRGTYEIMRPQEVGWVCSHMVLGRHSGRAAVEQRLRALGYLLEEEDLKLVFEEFKQLCEKQRLVTDVDLQVLMQDTTVQHGYRLASMTISDIGNRANALVELSDPQGQRVAETAQGNGPVDALFGALAAATGVKLELDSYQVHSVGIGADARGEANLSV

SEQ ID NO: 372 - protein, 533 aa, Synechococcus sp. PCC 7002
MNNQDDRIIIFDTTLRDGEQSPGATLNGDEKLAIARALARLGVDVIEAGFPRASRGDFDAVQRIAAEVGTENGPTICGLARATKGDIEAAGNALKPAFSNRIHTFIATSDIHLEYKLRKSRKDVLAIAPEMVAYAKTFTNDVEFSPEDAGRSDPEFLYQILEAVIDAGATTVNIPDTVGYTTPAEFGALIKGIKENVPNIDRAIISVHGHNDLGLAVANFLEAVKNGARQLECTINGIGERAGNAALEELVMALHVRRQYYNPFLGRPADSEAPLTSINTKEIYKTSRLVSNLTGLSVQANKAIVGLNAFAHESGIHQDGVLKNKLTYEIMDAQSIGLTDNQIILGKHSGRNAFRTRLAELGFDLSDNDLNKAFLRFKDLADKKKEITDWDLEAIVKDETQQPPELFRLELVQVSCGDHAQPTATITIRTPGGKELTDAAIGTGPVDAIYKAINRVVQVPNELIEYSVQSVTAGIDAIGEVTIRLRHEGRIYSGHAANTDIVVASARAYISALNRLYAALQEDVSANPAKASL

SEQ ID NO: 373 - protein, 517 aa, Haemophilus somnus 2336
MQNNIIIFDTTLRDGEQALKASLTVKEKLQIALALERLGVDVMEVGFPVSSAGDFESVQTIARHIKNSRVCALSRAVDKDIDIAADALKVAEAFRIHTFIATSALHVEAKLRRTFDDVVEMAIQAVKRARRYTDDVEFSCEDAGRTGVDNICRIVEAAIKAGATTVNIPDTVGFCLPTEYGNIIDQVMNRVPNIDKAVISVHCHNDLGMATANSLTAVQNGARQIECTINGIGERAGNTALEEVVMAIKTRQDIFKGLDTRINTQEIHRVSQMVSQLCNMPIQPNKAIVGSNAFAHSSGIHQDGMVKNKNTYEIMSPETIGLKKEKLNLTARSGRAAVKSHMDAMGYQQNDYDLDKLYAAFLKLADKKGQVFDYDLEALAFIDMQQGDEDRLSLDVITSQTISNLPASAFVQVELDGKKISQVSNGGNGPVDAVYNAILAITDMDITMLHYNLTAKGEGAEALGQVDIVVEHKGRRFHGVGLATDIVESSARALIHAINAIYRANKVADLKSHKISQ

SEQ ID NO: 374 - protein, 401 aa, Frankia sp. FaC1
MTVRETRFPSSSATATQPDAVVRFCDTTLRDGEQAPGVAFTAAEKLAIAGALDAIGVHQIEAGIPGMGVTERDVLREILATDPKAEIVGWCRADHRDVEAAASCGLVTAHLTIPVSDLHLKSKLERDRAWARRRVRDCVVDGTDRGMRVSVGFEDASRADDAFVTDLAGELRDVGVTRLRWADTVGLLDPVSAYDRLGRLVRAVPGPWEIHAHDDFGLATANTIAAVQAGFTWVSTTVLGLGERAGNAPIEEVAMALRHLLKLPIDLDTTSFRTLAQLVVGWPLPAGKKAVVGESVFAHESGIHVHGILRHPATYEPFDPEVGGRRRLTVGKHSGRASLRHALEQCGITAEESELEPLVEQVRLAATRHKRGLDSRDLPGTSRAGRDAGPRAGTPTREEPV

SEQ ID NO: 375 - protein, 252 aa, Hordeum vulgare
MGRGRIEIKRIENTTSRQVTFCKRRNGLLKKAYELSVLCEAEIALIVFSARGRLYEYASNSTRTTIDRYKKASASSSGSAPAIDVNSQQYFQQESAKLRQQILSLQNANRHLMGDSVGNLTVKELKTLENRLDKSIGRIRSKKHELLSAEIEYMQKLEADLQSENMYLRAKVADAERLALAPASGGGELEVLPTFDARSYYQHQVNMLQDAAAASSSSRYSQSSQPQTAAAAAAATALHLGYEIKGGQAQLN

SEQ ID NO: 376 - protein, 672 aa, Brassica oleracea
MSSSSSMLIGESHGATSFLNCSIDSSSLSLPANRFTILLTSSPMASSLLRNPTLSSSPSLPTFSSTITTTTPLSFRFPPYSHHHHHRRSSSASLRLSCSISDPPPPLPPHPLRRRRPDYIPNRISDPNYVRIFDTTLRDGEQSPGATLTSKEKLDIARQLAKLGVDIIEAGFPAASKDDFEAVKTISETVGNAVDENGYVPVICGLSRCNKKDIQTAWEAVRYAKRPRIHTFIATSDIHLEYKLKKSKQEVIEIARSMVRFARSLGCDDVEFSPEDAGRSEREFLYEILGEVIKAGATTLNIPDTVGITLPSEFGQLIADLKANTPGIENVVISTHCQNDLGLSTANTLSGAHAGARQVEVTINGIGERAGNASLEEVVMAIKCRGDHVLGGLFTGIDTRHIVMTSKMVEDYTGMQTQPHKAIVGANAFAHESGIHQDGMLKHKGTYEIICPEEIGLERSNDAGIVLGKLSGRHALKDRLTELGYVLDDEQLSTIFWRFKSVAEQKKRVTDADIIALVSDEVFQPEAVWKVLDIQITCGTLGLSTATVKLADADGKEHCACSMGTGPVDSAYKAVDLIVKEPATLLEYSMNAVTEGIDAIATTRVLVRGNNTYTSTNAITGEEVLRTFSGTGAGMDIVVSSVKAYVGALNKMLDFKEKSPKKVPSRNIKVTA

SEQ ID NO: 377 - protein, 377 aa, Cyanothece sp. ATCC 51142
MNHVHVNDTTLRDGEQAAGIVFSAIEKIAIACLMDAIGIPELEVGIPAMGGSEAEAITAIVQKGLKTALLGWNRAVRSDIEASIACGLRRVHISVPVSDIQIKAKFKGKTNLVWDRLRDSINFALDHDLFVSVGAEDASRADESFLVEVAQFAESLGASRFRFCDTVGILNPLTTAQKVGKLVKSIKMPIEMHTHNDFGLATANALAGLQAGAVSVNTTVNGLGERAGNAALEEMIMALKRLYQVDLGMETSRLRELSQLVVKASGIPLPPWKAIVGDNVFAHESGIHAHGVLQNPQTYEPFSPDEVGWKRRLVVGKHSGRHLLTNLLSQHGISLNHEESQVVLDSVRHLSVQMKRSLTVEELIDVVTNRSMSHGIV

SEQ ID NO: 378 - protein, 537 aa, Cyanothece sp. ATCC 51142
MSNQPDHIIIFDTTLRDGEQSPGASLTVEEKLTIARALARLGVDIIEAGFPYASPGDFEAVQKIAKTVGNESGPRICGLARATKNDIKAAGEALKPAFKSRIHTFIATSDIHLKHKLKKTRQEVLAIVPEMVAYAKTFTDDVEFSPEDAGRSDPEFMYQVLETAIAAGATTVNIPDTVGYTTPSEFGALIKGIKDNVPNIDQAIISVHGHDDLGLAVANFLEALKNGARQLECTINGIGERAGNAALEELVMALHVRRQYFNPFLGRPVDSMEPLTNINTKEIYKTSRLVSNLTGMIVQPNKAIVGANAFAHESGIHQDGVLKNKLTYEIMDAESIGLTNNQIVLGKLSGRNAFRTRLDELGFELSERDLNNAFLRFKEVADKKKEITDWDLEAIVNDEIQQAPELFRLELVQVSCGDHSAPTATVTLRTPEGKELTDAAIGTGPVDAVYKAINRVVNVPNELIEFSVKSVTAGIDAMGEVTIRLRHEGRIYSGYAANTDIITASARAYISALNRLYGAIQEQTKVHPSEPVLTSKN

SEQ ID NO: 379 - protein, 377 aa, Nostoc sp. PCC 7120
MNKVLINDTTLRDGEQAAGVVFTLEEKVAIAKFLDTIGVPELEVGIPAMGEEEMRAICAISNLGLKANLLAWNRAVISDIKASVACGMERVHIAIPVSGIQIAAKFHGQWRVSLQRLKDCISFAVDQGLWVAVGGEDSSRADENFLLDVALYAQEWGASRFRFCDTVGVLDPFTTYGKVKLLVSALTIPVEVHTHNDFGMATANALAGIKAGASSVNTTVIGLGERAGNAALEEVVMAIKRIYGVDMGIDTPRLLELSQLVAAASGANVPPWKAIVGENTFAHESGIHAHGVLQNPDTYEPFAPEEVGWERRLVVGKHSGRHSVSNLLEQHGIFLNPEETQSVLDAVRQQSIKKKRSLTTEELLNLVKEQRYSHAAR

SEQ ID NO: 380 - protein, 376 aa, Nostoc sp. PCC 7120
MNKVLINDTTLRDGEQAAGVAFSVEEKIAIAKFLDAIGVHEIEVGIPAMGKAEQEAIANIVKLDLSANLLGWNRAVIADIQASIACGLQRVHISIPVSAIQIAVKFHGQWQVVLQKLHDSISFAVDQGLFVSIGGEDSSRAEESFLLDVVLAAQEWGASRFRFCDTVGILDPFTTHAKVKQLVASLTIPVEMHTHNDFGLATANALAGTKAGALSVNTTVNGLGERAGNAALEEVVMALKHLYHHDLGIDTRRLLEISQLVASASGHPVPPWKAIVGENTFAHESGIHAHGVLQNPQTYEPFAPEEVGRERRLVVGKHSGRHLLSSILQQHDIILNHEETQFVLDAVRQESVEKKRSLTDQELLHLVQTKQHFRAC

SEQ ID NO: 381 - protein, 531 aa, Nostoc sp. PCC 7120
MTTKPEKIIIFDTTLRDGEQCPGATLNIDEKLAIAKQLARLGVDIIEAGFAFASPGDFEAVHKIAQTVGTQSGPVICSLARARHDDIKAAAEAIKPAAKGRIHTFIATSDIHLQYKLKKTRPEVIAIAEEMVAYAKSFTDDVEFSPEDAGRSDPEFLYQVLERAIAAGATTINIPDTVGYTTPSEFGAIIKGIKENVPNIDQAIISVHGHNDLGLAVANFLEAVKNGARQLECTINGIGERAGNAALEELVMAMHVRRQYFNPFLGRHPDSEEALTNIDTKQIYKTSRLVSNLTGMLVQPNKAIVGANAFAHESGIHQDGVLKNKLTYEIMDAQLIGLTDNQIVLGKHSGRNAFRTRLKELGFELSETELNKAFVKFKEVADKKKEISDWDLEAIVNDEIQQAPDLFRVELVQVSCGSNARPTATVTLRTPDGEELTDAAIGTGPVDAVYKAINRVVNVPNQLIEFSVQSVTAGIDAIGEVTIRLRYESRVFSGHAANTDIIVASAQAYVNALNRLYASLQTQDKQTEVTA

SEQ ID NO: 382 - protein, 513 aa, Ralstonia solanacearum GMI1000
MSDKLIIFDTTLRDGEQSPGASMTKEEKIRIAKQLERLKVDVIEAGFAASSNGDFEAIRAIAQSVKDSRICSLARANDRDISRAAEALKPAGQFRIHTFIATSALHMEKKLRMTPDQVYEQARLAVRFARQFTDDIEFSPEDGSRSDMDFLCRVLEGVIAEGATTINLPDTVGYAVPEGYAALIRSVRERIPNSDKAIWSVHCHNDLGMAVANSLAAVKLGGARQIECTINGLGERAGNTSLEEVVMAVKTRRDYFNLDVGVDTTQIVPASKLVSQITGFVVQPNKAVVGANAFAHASGIHQDGVLKARDTYEIMRAEDVGWTANKIVLGKLSGRNAFKQRLQELGIELDSEAELNAAFTRFKELADQKAEIFDEDIVAIVSNEAQHAEGEHFRFVSLSQRSETGERPHARIVFVADGKEVTGEAEGNGPVDATLNAIESKVASGAEQLLYSVNAITTGTQAQGEVTVRLSKSGRIVNGVGTDPDIVAASAKAYLAALNKLQDKSSEKLNPQI

SEQ ID NO: 383 - protein, 503 aa, Arabidopsis thaliana
MASLLLTSSSMITTSCRSMVLRSGLPIGSSFPSLRLTRPYDKATLFVSCCSAESKKVATSATDLKPIMERRPEYIPNKLPHKNYVRVLDTTLRDGEQSPGAALTPPQKLEIARQLAKLRVDIMEVGFPVSSEEEFEAIKTIAKTVGNEVDEETGYAPVICGIARCKKRDIEATWEALKYAKRPRVMLFTSTSEIHMKYKLKKTKEEVIEMAVNSVKYAKSLGFKDIQFGCEDGGRTEKDFLCKILGESIKAGATTVGFADTVGINMPQEFGELVAYVIENTPGADDIVFAIHCHNDLGVATANTISGICAGARQVEVTINGIGERSGNAPLEEVVMALKCRGESLMDGVYTKIDSRQIMATSKMVQEHTGMYVQPHKPIVGDNCFVHESGIHQDGILKNRSTYEILSPEDVGIVKSENSGIVLGKLSDVHAVKDRLKELGYEISDEKFNDIFSRYRELTKDKKRITDADLKALVVNGAEISSEKLNSKGINDLMSSPQISAVV

SEQ ID NO: 384 - protein, 282 aa, Craterostigma plantagineum
LGLSLGSFGPSSSGGSHPPPALPLPSNLFRPSLQEIDRTQRSIGAFLQAPTAAAVCREPASAFRGIDVNRPPTIVDCGEENNNPIASPSPNSTVCSSSGKRTSGEREEKEDGDRAASSSFEVEDDDGGGGDASARKKLRLSKEQAVVLEETFKEHSTLNPKEKIALAKQLNLMPRQVEVWFQNRRARTKLKQTEVDCEYLRRCCENLTEENRRLQKEVNELRALKLSPQFYMSPPTTLTMCPQCERVAAQPSSAAAIRPPSHHQRPAAGMNSWAAMISPRPS

SEQ ID NO: 385 - protein, 503 aa, Arabidopsis thaliana
MASLLLTSSSMITTSCPSMVLRSGLPIGSSFPSLRLTRPYDKATLFVSCCSAESKKVATSATDLKPIVERRPEYIPNKLPHKNYVRVLDTTLRDGEQSPGAALTPPQKLEIARQLAKLRVDIMEVGFPVSSEEEFEAIKTIAKTVGNEVDEETGYVPVICGIARCKKRDIEATWEALKYAKRPRVMLFTSTSEIHMKYKLKKTKEEVIEMAVNSVKYAKSLGFKDIQFGCEDGGRTEKDFLCKILGESIKAGATTVGFADTVGINMPQEFGELVAYVIENTPGADDIVFAIHCHNDLGVATANTISGICAGARQVEVTINGIGERSGNAPLEEVVMALKCRGESLMDGVYTKIDSRQIMATSKMVQEHTGMYVQPHKPIVGDNCFVHESGIHQDGILKNRSTYEILSPEDVGIVKSENSGIVLGKLSGRHAVKDRLKELGYEISDEKFNDIFSRYRELTKDKKRITDADLKALVVNGAEISSEKLNSKGINDLMSSPQISAVV

SEQ ID NO: 386 - protein, 234 aa, Antirrhinum majus
MGRGKIVIQRIDKSTSRQVTFSKRRSGLLKKAKELAILCDAEVGVVIFSSTGKLYEFSSTSMKSIIERHTKTKEDHHQLLNHGSEVKFWQREAATLRQQLQDLQENHRKLMGEELQGLNVEDLHRLENQLEMSLRGVRMKKVQMLTDEVHELRRKGHLIHQENNELYEKVKLLQQENKELCKKAYGTRDVSAANGTALVPFGFAIGREQFEPIQLHLSQPEPENIETSRASGSK

SEQ ID NO: 387 - protein, 445 aa, Pyrobaculum aerophilum str. IM2
MVFSEEWRIRIAKALSDIGVAMIEAGDPNVAPDIKSAIKKIIALKKNGDIKSEIVVHSRAVRQDLENAASLEPDRIAVFYGVSDLHLKYKHKKTREEALQIIAEMVSLAKSHGVSVRFTAEDGSRADLDYLIQVVKTAYEAGADRVSIADTVGVFTPERAREVFSKVKAAVPGVGLDIHAHNDFGMAVANSLAAVEGGADVVHTTVNGLGERAGITPLQVFAAAYYYHYGVKLIKLEKLPEITAMVEAATGITIMPTFPIVGENAFTHKAGVHQAGVLSNPETYEPIPPETVGRNRDFSLDKYSGRKAIQHRLEKLGISVPQDVVEKVVEEVKRINLPRLRDEDLLEILEKVSNMKFKAIVNRHIEAYVWLKVANNVYTTSVARRVATLKNVVSVSEITGDYDIVVKIIAENTEELNRVIENIREIKGVASTLTSIVLKELPTNH

SEQ ID NO: 388 - protein, 364 aa, Pyrobaculum aerophilum str. IM2
MPGVALSISEKLEIAMALDDAGVDMIEAGFAAVSDDEKEAIKLISKEVSRAKVVSLARMTKSDVDAAAEADVDMIHLFIATSDIHLKYKLGITREEALRRIEEVVSYAKSYGVEILFSAEDATRSDLEFLAKAYKTAIEAGADEINVPDTVGVMTPSRMAYLIKYLRERLPPIPMHVHCHDDFGMAVANTVTAIENGADVAQVVVNNFGERAGNAALEEVVAAVHYLLGLRTNIKLEKLYSLSQLVSKLFGVPVPPNKAVVGENAFSHEAGIHVHGVLNNPFTYEPMRPEDVGNRRRIVLGKHSGRHSVIWALKNLGVEPSEDLVNYVLDAVKKLAVKKVKVDEAVLREIVNRYNKGLSMSYAV

SEQ ID NO: 389 - protein, 396 aa, Arabidopsis thaliana
MDCNMVSSFPWDWENLIMSNQSKTENEKKQQSTEWEFEKGEGIESIVPDFLRFEKVSSGSATSFWHTAVSKSSQSTSINSSSPEDKRCNLASQSSPGDSSSNIDFLQVKPSTALEVPIASAESDLCLKLGKRTYSEEFWGRNNNDLSAVSMNLLTPSVVARKKTKSCGQSMQVPRCQIDGCELDLSSSKDYHRKHRVCETHSKCPKVVVSGLERRFCQQCSRFHAVSEFDEKKRSCRKRLSHHNARRRKPQGVFPLNSERVFDRRQHTSMLWNGLSLNTRSEEKYTWGTTYETKPTQMESGFTLSFQRGNGSEDQLFTGSTLSFSAFQTSGGFSAGKSNIQLPDKGVGECSGGLHESHDFYSALSLLSTTSDSQGIKHTPVAEPPPIFGTFPSHFI

SEQ ID NO: 390 - protein, 377 aa, Nostoc punctiforme PCC 73102
MNQIIINDTTLRDGEQAAGVAFTLQEKVAIAKFLDSIGIPELEVGIPAMGDEETRAIAAISDLGLQAKLLGWNRAVISDIKASIACGLNRVHIAIPVSGIQIAAKFHGQWRVSLQKLKDCISFAVDQGLWVAVGGEDSSRADENFLLDVALYAQEWGASRFRFCDTVGVLDPFTTYTKVKRLVSALMIPLEIHTHNDFGLATANALAGIKAGALSVNTTVNGLGERAGNAALEEVVMAIKRIYGVDLGIDTPGLLELSQLVAAASGASVPPWKAIVGENTFAHESGIHAHGVLQNPITYEPFAPEEVGWERRLVLGKHSGRHLVSNLLEQHGIFLNSQETQSVLDAVRHQSVQKKRSLTTEELLNLVREQRYSHATR

SEQ ID NO: 391 - protein, 534 aa, Nostoc punctiforme PCC 73102
MTNKTDRIIIFDTTLRDGEQCPGATLNIDEKLVIAKQLARLGVDIIEAGFAFASPGDFEAVSKIAQIVGTENGPVICSLARAIKADIEAAAEALKPAVKGRIHTFISTSDIHLEYQLRKSRAEVLAIAEEMVAYAKSFMTDVEFSPMDAARSDPEFLYQVLERTIAAGATTVNIPDTVGYTTPSEFGAIIKGIIENVPNIDQAIISVHGHNDLGLAVANFLEAVKNGARQLECTINGIGERAGNASLEELVMALHVRRQYFNPFLGRPEESQESLTNIDTRQIYKTSRLVSNLTGMLVQPNKAIVGANAFAHESGIHQDGVLKNKLTYEIMDAQLIGLTDNQIVLGKHSGRNAFRTRLKELGFELSDTELNKAFVRFKEVADKKKDISDWDLEAIVNDEIQQAPDLFRVELVQVSCGSNARPTATVTLRTPKGEELTDAAIGTGPVDAVYKAINRVVNVPNELIEFSVQSVTAGIDAIGEVTIRLRYESKVFSGHAANTDIIVASAQAYVNALNRLYASLQTQEKPEEVTAQKV

SEQ ID NO: 392 - protein, 540 aa, Nostoc punctiforme PCC 73102
MSITSQPDRVIIFDTTLRDGEQSPGATLNVEEKLAIAHQLALLGVDVIEAGFAVASPGDFQAVKTIAEQVGIPGGPIICSLARAIRQDIHAAAEALKGAARPRIHTMISTSDIHLKYQLKKSRSEVLAIASEMVAYAKSFVDDVEFSPMDASRTEPEFLYEVLEAAIAAGATTINIPDTVGYCTPKEIGTLIQGIREHVPNIDGVILSIHTQNDLGLATANALAAIEYGVRQVECTINGIGERAGNAALEEIVMALQVRKPFFNPYFGRPVDADTPLTNIKTQEIYKTSSLVSQLTGMLIQPNKAIVGANAFAHESGIHQDGIIKHRQTYEIMEAAAIGLPENRIVLGKHSGRNAFRTRLKELGFELNEADLNKAFNRFKDVADKKKEISDWDLEAIVRDETQIQVESGFQIEHVQVICGDCTCPTATITIVTPDGKILTDASVGTGPVDAVYQAINRLVQIPNQLIEFSVQSVTGGIDALGTVTVRLKHQERIFSGQASDTDIVVAAAYAHINALNRLYRYLQTEKSEFHEINSAVVSG

SEQ ID NO: 393 - protein, 499 aa, Pyrococcus furiosus DSM 3638
MARKIKIFDTTLRDGEQTPGVSLTVEEKIEIAKQLARLNVDVIEAGFPISSPGEFEAVKRIAREVRGPTIAALARAVKKDIDAAGEALKDAESKRIHTFIATSLIHMKYKLRKTPEEVKKMAVEAVEYATKYTDDIEFSAEDATRSDWNFLVEVYEAVIDAGATTINVPDTVGYTTPEEFYELIRYLKRNITNLNGVTISVHCHNDLGLAVANSLSAVRAGADQVEVTVNGIGERAGNAALEEVVVALDVRKDFYNVETGINLGEIARTSKLVARLTGIEVPPNKAVVGANAFAHESGIHQDGVLKERTTYEIIDPRKLGFSGSKIVLGKHSGRHAFRKKLEEMGYRLSEEEINRLFAKFKEIADRKKGLTELDIEAIVQEELGKGKGKYSVEVLHVISGKISTATVRVQGDGIDKIESAWSSNGPIDALFAAINRALGIDCKLKEYRVSSVTSGRDALGEVLVRVEYNGEIYVGRGLSTDIIEASAQAYLSALNRIRR

SEQ ID NO: 394 - protein, 418 aa, Schizosaccharomyces pombe
MSVSEANGTETIKPPMNGNPYGPNPSDFLSRVNNFSIIESTLREGEQFANAFFDTEKKIQIAKALDNFGVDYIELTSPVASEQSRQDCEAICKLGLKCKILTHIRCHMDDARVAVETGVDGVDVVIGTSQYLRKYSHGKDMTYIIDSATEVINFVKSKGIEVRFSSEDSFRSDLVDLLSLYKAVDKIGVNRVGIADTVGCATPRQVYDLIRTLRGVVSCDIECHFHNDTGMAIANAYCALEAGATHIDTSILGIGERNGITPLGALLARMYVTDREYITHKYKLNQLRELENLVADAVEVQIPFNNYITGMCAFTHKAGIHAKAILANPSTYEILKPEDFGMSRYVHVGSRLTGWNAIKSRAEQLNLHLTDAQAKELTVRIKKLADVRTLAMDDVDRVLREYHADLSDADRITKEASA

SEQ ID NO: 395 - protein, 240 aa, Medicago sativa
RGKIQIKRIENTTNRQVIFSKRRNGLLKKAKELAILCDAEVGVMIFSSTAKLYDFASTSLRSVIGRYNKSKEEHNQLGSTASEIKFGQREAAVLRQQLHNLQESHRQIMGEELSGLTVKELQGLENQLEISLRGVRMKKEQLFMDEIQELNRKGDIIHQENVELYRKVYGTKDKNGTNRVLSLTNGVGIGDDSNRTCESPAQPATETRTTTALMHSLEISVLTCKQGKWTQILISYMNGI

SEQ ID NO: 396 - protein, 602 aa, Capsicum annuum
MASISINPYNISFRPRNPLTQTLLNFKPSIPTHSFSIPIVRCSIRCRPEYTPSHISDPNYIRIFDTTLRDGEQSPGATMTTKEKLDVARQLAKLGVDIIEAGFPASSEADLEAVKLIAKEVGNGVYEEGHVPVICGLARCNKRDIDKAWEAVKYAKKPRIHTFIATSEIHMKFKLKMSRDEVIEKARSMVAYARSIGCQDVEFSPEDAGRSDPEFLYHILGEVIKAGATTLNIPDTVGYTVPEEFGQLIANIKANTPGVEDVIISTHCQNDLGLSTANTLAGACAGARQLEVTINGIGERAGNASLEEVVMALKCRGEQVLGGLYTGINTQHILMSSKMVEEYTGLHVQPHKAIVGANAFAHESGIHQDGMLKHKDTYEIMSPEDIGLNRANESGIVLGKLSGRHALQAKMLELGYEIEGKELDDLFWRFKSVAEKKKKITDDDLIALMSDEVFQPQFVWQLQNVQVTCGSLGLSTATVKLIDADGKEHISCSVGTGPVDAAYKAVDLIVKIPVTLLEYSMNAVTQGIDAIASTRVLIRGENGHTSTHALTGETVHRTFSGTGADMDIVISSVRAYIGALNKMMSFRKLLAKNTKAEGSAVI

SEQ ID NO: 397 - protein, 513 aa, Cupriavidus taiwanensis
MSDKLIIFDTTLRDGEQSPGASMTREEKIRIARQLERLKVDVIEAGFAASSNGDFEAIRSIAQVVKDSTICSLARANDKDIARAAEALKPANSFRIHTFIATSALHMEKKLRMTPDQVYEQARLAVRFARQFTDDIEFSPEDGSRSDMDFLCRVLEGVIAEGATTINLPDTVGYAVPEGYAGLIRSVRERIPNSDKAVWSVHCHNDLGMAVANSLAAVKLGGARQIECTINGLGERAGNTSLEEVVMAVKTRRDYFNLDVGVDTTQIVPASKLVSQITGFVVQPNKAVVGANAFAHASGIHQDGVLKARDTYEIMRAEDVGWTANKIVLGKLSGRNAFKQRLQELGIELDSESEVNAAFARFKELADQKAEIFDEDIMAIVSNEAQHDANEHFRFISLSQRSETGERPHARVVFSMDGQEQSGEGEGNGPVDATLHAIESRVASGAEMVLYSVNAITGGTEAQGEVTVRLSKAGRIVNGVGTDPDIVAASAKAYLAALNKLHDKAVQKINPQI

SEQ ID NO: 398 - protein, 524 aa, Prosthecochloris aestuarii DSM 271
MSQKEKVLIFDTTLRDGEQSPGASLNVQEKIEIARQLEKLNVDVIEAGFPASSPLQLEAVRRVGEESSRIVAALARAVEHDISTAWKALQSARHPRIHTFISTSDIHIMGKFGHERYGKTLAEKQKTILRMAVDAVLYAKTFCHDIEFSAEDAGRTDPGYLAEVIEAVIDAGATTVNIPDTTGYTWPSEFGKKIADLKERVTNIDQAVISVHCHNDLGLAVANTLSAIENGARQAECSINGIGERAGNASLEEIVMALKVRSDLHDYSTGITTREIYNTSRMVSSFTGLIVQPNKAIVGDNAFSHESGIHQDGMLKNRQTYEVMTPQSVGVPETHIVLGRHSGKHGLQSRLLVLGYKVEGEELDKVYQRFLSVADKKKEIYDDDLRVLMGDEFNRPAEPIELDYLHINSGTASIPTATVRIKTRGRTFEESSTGDGPVDACFRAIERALKLDSLLNSYSVRSTSAGRQALGEATVRLRDGDNFYTGRGVSTDIIEASAKAYLQALSFHEDALQNDNNNSIDNGI

SEQ ID NO: 399 - protein, 390 aa, Prosthecochloris aestuarii DSM 271
MIHKREKADIAKRPVWIIDTTLRDGEQAPGVAFTPEEKKTIAGKLAECGVNELEIGYPAISSEEQAVITEIARMQLPLRLTSWARAKWEDIDAAIRCKTQGVHISFPLSELYLQLMDKPYEWVEEQLHLLVPKAKKYFDFVSVGGQDATRTGPDILERFIREAVECGADRIRIADTVGIATPLHLMQLISRIKKAVPATLEFHAHNDLGMATANAFSAMEAGCDAVSVSVTGLGERAGNAALEELAIALKLSGRYHSSIKTERLQELCGIVAKASNRNIEDQKPVIGASVFRHESGIHCNALLKNPLSYQPFLPGEIGRDNYELVIGKHSGSAAIQHVLAGNGIAIDRKEASRLLAPVRMTADRNKRGISADELTRIYQQYIVNPQDICR

SEQ ID NO: 400 - protein, 190 aa, Arachis hypogaea
MELPNQAPEEGSSQHHQKKMGRGKIEIKRIENTTNRQVTFCKRRNGLLKKAYELSVLCDAEVALVVFSSRGRLYEYANNIVRGTIERYKKASAASSNTESVSEANTQFYQQESSKLRRQIRDIQNLNRHILGEALSSLSLKELKNLESRLQKGLSRVRSRKHETLFADVEFMQKREIELQNHNNYLRAKI

SEQ ID NO: 401 - protein, 548 aa, Paulinella chromatophora
MAKDPGRILIFDTTLRDGEQSPGASLNPEEKVAIAQQLVLLGVDIIEAGFPFASPGDFNAVQNIAATIGTDSGPVICGLSRASEKDIKICAKAVAPAIRPRIHTFIATSDIHLKYKLRRKRGEVIQIVEDMVAYARSFVNDVEFSCEDACRSDPEFLYEVIETAILAGATTVNIPDTVGYATPGDFGELIAGINLNVPHIDQAIISVHGHNDLGLAVANFLEAIKNGARQLECTVNGIGERAGNASLEELVMAMQVRRTYFNPFLGRDVNSVQPLTKIKTQEIYKTSCLVSNLTGMIIQANKAIVGANAFAHESGIHQDGVLKNRLTYEIVDARTIGLPDCRLSLGKLSGRSAFKVRLKELGYHLNPEELDECFTLFKELADGKRNVTDQDIELIISEHIQQPEEVYKLKLVQVSCGSTLCPTATVTVQKNDNTEITKAAIGTGPIDAVYRTLNEIVGMPNELTEFSVKSVTAGINGKGEVTIRLRHKKIIYSGHSSHADIVVAATQACLNAINRLISTVRLSELESEKNKPLKSDSSETIDKSGKNS

SEQ ID NO: 402 - protein, 264 aa, Spinacia oleracea
MGRGRVQLKKIENKINRQVTFSKRRSGLVKKAHEISVLCDAEVALIVFSHREKLFEYSSDSAMETILEKYERYSYAERRLTSNDPDSQVSWSFDFAKLKSRLELLHRNHRHYLGQELDSLNIKELQSLEQQLDTALKNIRSKKNQLMHESISELQKKERAMQVHNNMLAKKIKDKGKNVVQEVQRSQQMQWQWQQQQQQPQQQQSLAQNHQGVSDASGFLLPPPPPSFNMGGAYQGEVGGEERRNDLDLTLEPIYSMPNDEMLY

SEQ ID NO: 403 - protein, 245 aa, Spinacia oleracea
MGRGRVQLKRIENKINRQVTFSKRRIGLLKKAHEISILCDADVGLIIFSTKGKLFEYASDSCMEKILERYERYSYAEKQLTTPDPESRVSWTLEHAKLKARLKILQKNQRNYMGEELDTLSLKELQNLEHQLDSALKHIRSKKNQVMHESISQLQKKDKALQEHNNMLIKKVKEKEKALAKQSETDQETYDLNSSGFLSQALPSLNTVGTCSSAVEDDQTTQQPSRTNNNSTIMPSWMLRHISEQ

SEQ ID NO: 404 - protein, 193 aa, Zea mays
MEWTVPKRAASPPSPPLLWDWGGDHAGATGSGSGSSGDAPARRGGREREAKRARADDGEVRCQVEGCGLDLSRVKEYHRKHRVCEAHTKSPRVVVAGQERRFCQQCSRFHALSEFDQKKRSCRRRLSDHNARRRKPQPDAFAFASARLPSSSFADFPGRKRRGLLPKDKSISLFPDFSSCYLHNKFSNMIGGK

SEQ ID NO: 405 - protein, 327 aa, Brassica oleracea var. alboglabra
  misc_feature (267)..(267): Xaa can be any naturally occurring amino acid
  unsure (1)..(327): unsure at all Xaa locations
MDSWSYGTFLLPSDSFPENPRTMAQGLSNEFDKVDDVNGLCAVSSSSNLSSLDFKLRSFMDYGNYDGNTSSRAKKPRASSSSPLCQVHGCNMDLSSSKDYHKRHRVCEAHSKTSVVIVNGIEQRFCQQCSRFHFLSEFDNGKRSCRRRLAGHNKRRRKPSFYFLHGKQQQQHKLLPQGTKLSAFLPLATDFHGRLVSFKDEPMFPAENMSFYSPEAASGVSSIWDLHEAAPPRYTCAHSLLSAQSQQHLSETQNQTLNASIIDYHHXQPLRTDLGNSKTDSSSCNGKRSSTVDLLQLSSHLQRIEQQQRSFTNDDVKHEYNNELYFP

SEQ ID NO: 406 - protein, 487 aa, Brassica rapa subsp. rapa
MVVRSFLPFGSVRLTRPYNNSSLLISCCSSVSKNAETSGTDLKTIVERWPEYIPNKLPDKNYVRVFDTTLRDGEQSPGAALTPPQKIEIARQLAKLRVDIMEVGFPVSSEEEFETIQTIAKTVGNEVDEETGYIPVICVIARSKERDIKAAWESVKYAKRPRIVIFTSTSDIHLKYKLKMTREEVVDMVASSIRFAKSLGFEDIEFGCEDGGRSDKDYICTVFEEAIKAGATTLACPDTVGINMPHEYGKLVRYIKANTPGIDDVIFSAHCHNDLGVATANTIAGICAGARQVEVTINGIGERSGNAPLEEVVMALKCRGAFVMGGVYTRIDTRQIMATSKMVQEYTGLYVQPHKPIVGANCFVHESGIHQDGILKNRSTYEIISPEDVGVVKSQNSGIVLGKLSGRHAVKGRLKELGYEISDEKLNEVFSRFRDLTKQKKRVTDDDLKALVTCGDEIFSSDKLNGTDDNEINSNGYVPAPQISSVV

SEQ ID NO: 407 - protein, 405 aa, Methanosarcina acetivorans C2A
MSESEQYSRNTLMDFIEYRPLDIEICDVTLRDGEQTPGVVFTKEQKLAVASELDSMGIEVIEAGFPVVSAYEKEIVKEIANQGYDSRICCLSRAVKGDVDAALDCDVDIVSIFIAMSDMHLKYKYHRTLEDMLGCAKEAIEYATDHGLNVRFAAEDASRTPIDRLKQAFKEVENEYKVQYVSLADTIGILNPTTTHYLVSEIFKCVNTSICIHCHDDLGMATANTLAAAEAGAKQLHTTVNGIGERAGNASLEEMLVALRVQYGIERYDTTKLTALSRMISEYSNITPSVNKAVVGQNAFTHESGIHVAAILEEPRTYELFLPEMVGGKRNLVVGKHTGTKALKGIINSIGFCLEREELCALIEKVKVCTDEKRRSISREQLEKLIAQVRQEQKPSASEKEKFSI

SEQ ID NO: 408 - protein, 483 aa, Methanosarcina acetivorans C2A
MRDGEQTPGVALTREKKLLIARALDEMRINVIEAGSAITSAGERESIKAVANAGLDAEICSYCRIVKMDVDHALECDVDSIHLVAPVSDLHIKTKIKKDRDTVRQIAAEVTEYAKDHGLIVELSGEDASRADPEFLKAIYSDGIDAGADRLCFCDTVGLLVPEKTTEIFRDLSSSLKAPISIHCHNDFGLATANTVAALAAGAKQSHVTINGLGERAGNASLEEVVMSLEWLYKYDTGIKHEQIYRTSRLVSRLTGIPVSPNKALVGGNAFTHEAGIHVHGLLADKSTYEPMSPEYIGRQRQIVLGKHAGRSSITLALKEMGLEADEAQTEEIFNRVKQMGDQGKHITDADLQTIAETVLDIYKEPIVKLEEFTIVSGNRVTPTASIKLNVKDKEIVQAGIGNGPVDAVINAIRRAVSSCAEDVVLEEYHVDSITGGTDALVEVRVKLSKNGKVITASGARTDIIMASVEAVMNGMNRLIREE

SEQ ID NO: 409 - protein, 443 aa, Methanosarcina acetivorans C2A
MKIYESYEDLPKLKLPYGNEIFISDSTIRDGSQMPGIVLSREHKIQIYEYLHEIGIEKLEAFVFNKRDRDAVELMFDRGYECPEITGWARASRADIDKILEVDGLEETGILMSVSDTHIYSKMRLSGREEAEEKYLDALQYAVDHGLRTRAHLEDMTRADNYGFVFPLVKKIMEIDPDCIIRVCDTVGYGMPFMNIDEPYGIPKIVQYLKKDIGVKNIETHIHDDYGFGAASSIAGFWHGANWTSVTFLGIGERAGNSEMEKILLFLADRVEGFDKYNLEPVTRFAKFMEKELGLRVPRNKAVVGKNIFAHESGIHAAGVLKNPFNYEPYPPELVGSTRLLLIGDSSGLEVIRYKIQETLNDLLDVETIIEKDDRRLLKIQKEIQQLYDKEERVSCISDEELLAYVEKYFLYQPICDPAHTGRGKFKGKGKIQEPVEEVEETD

SEQ ID NO: 410 - protein, 515 aa, Methanosarcina acetivorans C2A
MYTLKEGIDFYIEPMQNKKVTVFDTTLRDGEQTPGVSLTSSQKLEISRQLDKLGVDIIEAGFPISSEGDKESVKSISNAGLETTVCGLARVLKKDIDACFESDVGLVHTFVPTSDVQRIYTIKKSQEEVIQLAVEAVQYIKDHGLKCMFSAMDATRTDPAYLIEVFKAVQEAGCDIINVPDTVGVMVPSAMYRQIKDIAAEITIPIDVHCHNDFGLAVANSLMAVEAGASQVQVTINGIGERAGNADLAQTVMSLASIYGIKTNIRTEYLVETSKMIENYTGIRLPPNTPVVGQNAFSHESGIHSQGVLEKSDTFEPGIMTPEMVGHRRRIVLGKHTGKHAVKQSLESAGVKTSENQLDEIVLRIKEIANKGKQITDADLYAVASAVLGKASSEEELIKLKEVSVMTGNILTPTAVVKADIEGKEIIAAKTGVGPVDAALKAVRDILGESNHFRLQEFRIDAITGGADALADVYIGLENEKGRIVTARSANPDIVMASVEALINAMNLLYKKEKS

SEQ ID NO: 411 - protein, 509 aa, Methanopyrus kandleri AV19
MREANADADPPDEVRIFDTTLRDGEQTPGVALTPEEKLRIARKLDEIGVDTIEAGFAAASEGELKAIRRIAREELDAEVCSMARMVKGDVDAAVEAEADAVHIVVPTSEVHVKKKLRMDREEVLERAREVVEYARDHGLTVEISTEDGTRTELEYLYEVFDACLEAGAERLGYNDTVGVMAPEGMFLAVKKLRERVGEDVILSVHCHDDFGMATANTVAAVRAGARQVHVTVNGIGERAGNAALEEVVVVLEELYGVDTGIRTERLTELSKLVERLTGVRVPPNKAVVGENAFTHESGIHADGILKDESTYEPIPPEKVGHERRFVLGKHVGTSVIRKKLKQMGVDVDDEQLLEILRRLKRLGDRGKRITEADLRAIAEDVLGRPAERDIEVEDFTTVTGKRTIPTASIVVKIDGTRKEAASTGVGPVDATIKALERALKDQGIDFELVEYRAEALTGGTDAITHVDVKLRDPETGDIVHSGSSREDIVVASLEAFIDGINSLMARKRS

SEQ ID NO: 412 - protein, 499 aa, Methanopyrus kandleri AV19
MPDRVRIFDTTLRDGEQTPGVSLTVEEKVEIARKLDEFGVDTIEAGFPVASEGEFEAVRAIAGEELDAEICGLARCVKGDIDAAIDADVDCVHVFIATSDIHLRYKLEMSREEALERAIEGVEYASDHGVTVEFSAEDATRTDRDYLLEVYKATVEAGADRVNVPDTVGVMTPPEMYRLTAEVVDAVDVPVSVHCHNDFGMAVANSLAAVEAGAEQVHVTVNGIGERAGNASLEQVVMALKALYDIELDVRTEMLVELSRLVERLTGVVVPPNTPIVGENAFAHESGIHSHGVIKKAETYEPIRPEDVGHRRRIVLGKHAGRHAIKKKLEEMGIEVTEEQLDEIVRRVKELGDKGKRVTEDDLEAIARDVVGEVPESEAAVKLEEIAVMTGNKFTPTASVRVYLDGEEHEAASTGVGSVDAAIRALREAIEELGMDVELKEYRLEAITGGTDALAEVTVRLEDEDGNVTTARGAAEDIVMASVKAFVRGVNRLARRRRD

SEQ ID NO: 413 - protein, 397 aa, Methanopyrus kandleri AV19
MQSPYVREAVREMDLPDEVIVYDTTLRDGEQTPGVSFTPEQKLEIAHLLDELGVQQIEAGFPVVSEGERDAVRRIAHEGLNADILCLARTLRGDVDAALDCDVDGVITFIATSELHLKHKLRMSREEVLERIADTVEYAKDHGLWVAFSAEDGTRTEFEFLERVYRTAEECGADRVHATDTVGVMIPAAMRLFVAKIREVVDLPIGVHCHDDFGMAVANSLAAVEAGAQAISTTVNGIGERAGNAALEEVIMALKELYGIDPGFNTEVLAELSRKVSEYSGIDVPPNKAVVGENAFRHESGIHVAAVLEEPRTYEPIDPKEVGMNRKIVLGKHTGRKAVVAKLEELGVEPEEEIVEEVLKRIKALGDRRVRVTDSKLEEIVRNVLESRGDRDDPGSR

SEQ ID NO: 414 - protein, 414 aa, Frankia sp. EuIK1
MSRPTRPGTHSQRPGSPQPSKVPVTIIMKSGTSSPEPDPVRFCDTTLRDGEQTPGVAFTAREKIAIAVALDAAGVHQIEAGVPAMGPVEVDVLRRVVAAVDRAGVVAWCRADHRDIDAAVASGVTAAHLTIPVSDLHLHTKLGKDRAWARTRIRDCVLDATDRGLRVSVGFEDASRADDDFVIDLAGELRGLGVSRFRWADTLGVANPITLHTRLRALLDAVPAPWEIHAHDDFGLATANTIAAVQAGFTWVSTTVAGLGERAGNAPTEEVAMALRHLLGLPVDLDTAAFRPLARLVAGASRRPVPAGKAVVGDAVFDHESGIHVHGVLRAPATYEPFDPAEVGARRRLVLGKHSGRAAVRHAMDRDGIEAPDEDLEPIVGLVRAHATVYKQPLNSEQLRAMARRVRARGGRSR

SEQ ID NO: 415 - protein, 139 aa, Arabidopsis lyrata subsp. petraea
STGKRSEREEDTDPQGSRGISDDEDGDNSRKKLRLSKDQSVILEETFKDHSTLNPKQKQALAKQLGLRARQVEVWFQNRRARTKLKQTEVDCEFLRRCCENLTEENRRLQKEVTELRALKLSPQFYMHMSPPTTLTMCP

SEQ ID NO: 416 - protein, 325 aa, Cytophaga hutchinsonii ATCC 33406
  misc_feature (1)..(1): Xaa can be any naturally occurring amino acid
  misc_feature (123)..(123): Xaa can be any naturally occurring amino acid
  misc_feature (156)..(156): Xaa can be any naturally occurring amino acid
  misc_feature (177)..(177): Xaa can be any naturally occurring amino acid
  misc_feature (190)..(190): Xaa can be any naturally occurring amino acid
  misc_feature (248)..(248): Xaa can be any naturally occurring amino acid
  misc_feature (250)..(250): Xaa can be any naturally occurring amino acid
  misc_feature (279)..(279): Xaa can be any naturally occurring amino acid
  misc_feature (281)..(281): Xaa can be any naturally occurring amino acid
  unsure (1)..(325): unsure at all Xaa locations
XSLGKRIFVFDTTLRDGEQVPGCQLNTEEKIIVAKALDELGVDVIEAGFPVSSPGDFNSVVEITKAVTRPTICALTRAKEADINIAGEALRFAKRSRIHTGIGSSDIHIEHKLRSTRENILEXAVAAVKQAKKVVHEVEFFCEDAGRADQAFLARXVEAVIEAGADVVNIPDTTGYXLPWQYGERIKYLXDNVSNIDKAILSAHCHNDLGLATANSLAALQNGARQVECTINGIGERAGNTALEEVVXAXECHKETLGLETGINHKKLVPISHLVSTLXRXQVQSNKAIVGRNAFAHSSGIHQDGFLKHRETYEIIDEGHHHHHH

SEQ ID NO: 417 - protein, 514 aa, Burkholderia cenocepacia J2315
MTDKLIIFDTTLRDGEQSPGASMTKEEKIRIAKNLERMKVDVIEAGFAASSNGDFDAIHTIAGLVKDSTICSLARANDKDIQRAADALKPANSFRIHTFIATSPLHMEKKLRMTPDQVFEQARLAVRFARKFTDNVEFSPEDGSRSDMDFLCRVLEAVIAEGATTINIADTVGYGVPELYGNLVKTLRERIPNSDKAIFSVHCHNDLGMAVANSLAGVKIGGARQVECTINGLGERAGNTSLEEIVMAVKTRKDYFGLDVGIDTSQIVPTSKLVSQITGFVVQPNKAVVGANAFAHASGIHQDGVLKARDTYEIMRAEDVGWTANKIVLGKLSGRNAFKQRLQELGVSLDSEAELNAAFMRFKDLADRKAEIFDEDIIAIVSEESALAQEQEHFKFVSLSQRSETGEQPQAKVVFAVEGKEVTGEARGNGPVDATFNAIEGEVGSGSELLLYSVNAITTGTQAQGEVTVRLSKSGRIVNGVGTDPDIVAASAKAYISALNKLHSKDDKVNPQRS

SEQ ID NO: 418 - protein, 504 aa, Thermodesulfovibrio yellowstonii DSM 11347
MRRIKIFDTTLRDGEQSPGASMNVDEKIQVAKQLKKLGVDIIEAGFPIASPGDFEAVNRISKEVKGIVVAGLCRARDEDIERAAEALKPAEQKRIHTFIATSDIHLKYKLRMDRDQVIQAAVKAVKKAKQYTDDVEFSAEDATRSDWDYLCKVTEEVIKAGATTVNIPDTVGYTIPQEYGELIEYLMNKVPNIDKATISVHCHNDLGLAVANSLTAILKGAGQVECTINGIGERAGNAALEEIVMALKVRNDFFKADTGIVTQEIYRTSRLISKITGMVVQANKAIVGANAFAHEAGIHQDGVLKERTTYEIMRPEDIGIPSSKIVLGKHSGRHAFKKRLEELGFSLTEEEINRAFERFKKLADQKKYIFNEDIEALVSDEVLRIAEVYQLIDLEVASGTKKKPTATVKMKINGDEKEITVSGDGPVDSVYRAITELTGSKAELNKFEIKAITGGTDALGEVTVILEEGGHTVRGHGSDTDIIVASAKAYINALNKLALKNLKT

SEQ ID NO: 419 - protein, 382 aa, Dictyoglomus thermophilum H-6-12
MKNTDIKIVDTTLRDGEQTAGVVFSKAEKLQIARMLDEIGVHQIEAGIPVMGGDEEEAIKAIVKAGLKASIMGWNRAVISDIEASLRCGVDAVAISISTSDIHIKYKLKKTREWVLENMVKATEFAKKHGVYVSVNAEDASRTDMEFLLQFAKAAKEAGADRLRYCDTVGIMEPFTMYEVIKTIIEKVGIPVEMHTHNDFGMATANALAGVRAGATYVGVTVNGLGERAGNAALEEVVMALKYIYNIDLGIKTYKLRELSEYVAKASQRELPVNKAIVGKNIFAHESGIHADGVIKYPKTYEVFSPEEVGGERQIVIGKHSGTHALIRKFQEYGINLPEEDAQELLKKVRALAVELKRPLFDKELMYLYQDYLKEKAKKEGE

SEQ ID NO: 420 - protein, 503 aa, Dictyoglomus thermophilum H-6-12
MTKLYIFDTTLRDGEQTPGVNLNKEEKLEIAKQLAKLNVDIIEAGFPIASPGEFEAVKTIAENVKGPVIAALARAIPMDIDRAWEAIKYSESPRIHTFIATSDIHIEKKLKKTRDEVLEQAVSAVKYAKRYCSDVEFSAEDAVRSDFNFLVKIFEAVIDAGATVINIPDTVGYALPWEFGDLIRRLKENIKNIDKAIVSVHCHNDLGLATANSLSAIVNGAEQVECTINGLGERAGNAAMEEIVMAIKVRRLPFEVGIKTEEIYKTSKLVSNLTGIVIQPNKAIVGENAFAHESGIHQHGVIQDPSTYEIIDPKMIGIPESKIVLGKHSGKHAFEKRLQELGYSLPPEQLEEAFKKFKELADKKKEITDKDIEALVSNQIKLVPEYYRLVHLQVVSGIGIVPTATIIISEDGEEIKTVEIGNGPVDAVYKAIAKAIKIPHSLEDFSLKSVTGGTDALGEAMVKLSDKDGNIYVGRATSTDIVEASALAYLRALNQLVMLKGKG

SEQ ID NO: 421 - protein, 397 aa, Thermoanaerobacter tengcongensis MB4
MGVKRVIVFDTTLRDGEQTPGVNFNSRDKLEIAYQLAKLGVDVIEAGFPAASNGDFEAVKNIADYVKGVTIAAMGRAVKEDIDRASSALKNAEKSRLHVFIATSDIHLQYKLKMTRDEVLKKAVEMVKYARGKFDEIEFSAEDASRTDWDFLVKVFSEVIDAGAHIINVPDTVGYAMPREYGELIRYIRNNVPNIDGVTISAHCHNDLGLAVANSLSAIENGATQVEVTVNGIGERAGNAAMEEVIMALNTRKDYFGLVHGINTKEIYNTSKLVSELTGIKLQPNKAIVGANAFRHQSGIHQHGVINNRLTYEIMRPEDIGVVPDTFALGKLSGRNAFELKVRQLGYNLSPGEISEAFRKFKDLADRKKTIVEEDIRFVVEETIEEFRGFREGEAWA

SEQ ID NO: 422 - protein, 384 aa, Thermoanaerobacter tengcongensis MB4
MAFKKDKPVYIVDTTLRDGEQTAGVVFANNEKIRIAQMLDEIGIDQLEVGIPTMGGDEKETVAKIAKLGLKASIMAWNRAVVKDVQESLECGVDAVAISISTSDIHIEHKLKKTRQWVLDSMTEAVRFAKKEGVYVSVNAEDASRTDMNFLIEFARCAKQAGADRLRFCDTVGFLDPFKTYEMVKAIKDAVDIEIEMHTHNDFGMATANALAGVKAGAKFVGVTVNGLGERAGNAALEEVVMALKYVYKMDLGIDTSRFREISEYVALASGRPLPPSKAIVGKNVFAHESGIHVDGALKNPYTYEVFDPQEVGLERQIVIGKHSGTAALINKFKEYGRVLTEEEANLLLPHVRKMAIQLKRPLFDKELMYLYEDVIVKGKAKAI

SEQ ID NO: 423 - protein, 237 aa, Pisum sativum
MDWNTDTTVPFVPPPGSSLSFFYNYNNYNYSGIEASEAALGETQQRLLPVIDDETNKINNGKDYREKKKTKNKKNKLTSNQVDALERSFHEEIKLDPERKMKLSAELGLQPRQVAVWFQNRRTRWKTKQLEHSYDVLKQENQKLQEEVMVLKEKLKEKSDCRTQTFGDETVESPLEGLGWREIEGYKPYPNSHNQQGSTSSIQQAAEGYINSSFIVEDFDSVSLHQECHWPELPYYP

SEQ ID NO: 424 - protein, 237 aa, Lathyrus odoratus
MDWNNERAVPFVPPPASSLSFFYNYNNYNYSGIEAGEAALGETQQRLLPVIDDETKMINNGKECQKKKKSKNKKNKLTSNQVDALERSFHEEIKLEPERKMKLSAELGLQPRQVAVWFQNRRTRWKTKQLEHSYDVLKQENQKLQEEVMELKEKLKEKSDGRTQTFGDETVESPLEGLGWREIEGYEPYPNSHNQQGSTSSIQQAAEGYINSSFIVEDFDSVSLHQECHWPELPYYP

SEQ ID NO: 425 - protein, 237 aa, Lens culinaris
MDWNTDSTVPFVPPPGSSLSFFYNYNSYNYSGIERSEAALGETQQRLLPAIDDETNKINNGKDHREKKKTKTKKNKLTSNQVDALERSFNEEIKLDPERKMKLSAELGLQPRQVAVWFQNRRTRWKTKQLEHSYDVLKQENQKLQEEVIELKEKLKEKSDFRTQTFGNETVESPLEGLEWREIEGYEPYPNSHNQHGSTSSIQQAAEGYMNNSFIVEDFDSVSLHQECHWPELPYFP

SEQ ID NO: 426 - protein, 237 aa, Vicia narbonensis
MDWNTDTTVPFVPPPGSSLSFFYNYNSYNYSGIEASEGALGETQQRLLPVIDDDPNKINNGKDNREKKKAKNKKNKLTSNQVDALERSFHEEIKLDPERKMKLSAELGLQPRQVAVWFQNRRTRWKTKQLEQSYDVLKQENQKLQDEVMELKEKLKEKADCRTQTFGDETVESPLEGLGWREIEGYNPYPSTYNQQGTSSSTQQAAEGYINNSFIVEDFDSVSLHQECHWPELPYYP

SEQ ID NO: 427 - protein, 237 aa, Vicia sativa
MDWNTDSTVPFVPPPGSSLSFFYNYNNYDYSGIEASEGALAETQQRLLPVIDDDPNKINNGKDHRDKKKAKNKKNKLTSNQVDALERSFHEEIKLDPERKMKLSAELGLQPRQVAVWFQNRRTRWKTKQLEQDYDVLKQENQKLQDEVMTLKEKLKEKGDCRTQAFGDETVESPLEGLGWREIEGYNPYPSCYNQQGTTSSTQQAAEGYINSSFIVEDFDSVSLHQECHWPELPYYP

SEQ ID NO: 428 - protein, 515 aa, Vibrio salmonicida LFI1238
MSDQVIIFDTTLRDGEQALSASLTVKEKLQIAFALERLGVDVIEAGFPISSPGDFESVRTIAKHIKNSRICALSRAVTKDIDVAADALKVAEAFRIHTFISTSTVHVQDKLRRSYDDVVEMGVKAVQRARKYTDDVEFSCEDAGRTPIDNLCRMVEAAINAGANTINIPDTVGYTIPGEFGGIIQTLFNRVPNIDKAIISVHCHDDLGMSVANSIAAVQAGARQVEGTINGIGERAGNCSLEEIAMILQTRSEYLGVHTSLKNDEIHRTSKLVSQLCNMPIQSNKAIVGANAFSHSSGIHQDGMLKNKNTYEIMTPESIGLKNKALNLTSRSGRAAVKSHMDSMGYKAEEYNLDTLYADFVKLADRKGQVFDYDLEALMHFANLRDEDDFYKLNYLSVQSGSVMATTSIKLLCGDEEKCEAAVGNGPVDALYQCIYKLTGYEIVLDKFDLTAKGEGEDGLGQADIIANYKGRKYHGTGLATDIIEASGQALLHVINSIHRADQIAEIKQNKITTV

SEQ ID NO: 429 - protein, 483 aa, Methanosarcina mazei Go1
MRDGEQTPGVALTKEKKLLIARALDEMKINVIEAGSAITSAGERESVRAVANAGLSAEICSYCRIVKTDVDHALECDVDSIHLVVPVSDLHIRTKIKKDRDTVRQIAADVTEYAKEHGLIVELSGEDSSRADLGFLKAVYSDGIDAGADRLCFCDTVGLLVPEKTTEIFRDLSSSLKAPISIHCHNDFGLATANTVAALAAGAKQAHVTINGLGERAGNASLEEVVMCLEWLYKYDTGIKHEQIYRTSRLVSRLTGIPVSPNKALVGGNAFTHEAGIHVHGLLADKATYEPMSPEYIGRQRQIVLGKHAGRSSITLALKEMGLEADDAQTEEIFNRVKQMGDQGKHVTDADLQIIAETVLDIYKEPLVKLEEFTIVSGNRVTPTASIKLNVKDKEIVQAGIGNGPVDAVINAIRRAVSSCAEDVILEEYHVDAVTGGTDALVEVRVKLSKEGKSITASGARTDIIMASVEAVMNGLNRLVRAE

SEQ ID NO: 430 - protein, 440 aa, Methanosarcina mazei Go1
MKIYESYEDLPKLKLPYGNEVFISDSTIRDGSQMPGIVLSREHKIQIYEYLHEIGIEKLEAFVFNKRDRDAVDLMFDKGYEFPEITGWARSSRADIDKILEVDGIEETGILMSVSDTHIHSKMRLSGREEAEERYLDALQYAVDHGLKTRAHLEDMTRADNYGFVFPLVKKIMEIDPDCIIRVCDTVGYGMPFMNIDEPYGIPKIIQHLKKEIGVKNIETHIHDDYGFGSASSIAGFWHGANWTSVTFLGIGERAGNSEMEKILLFLADRVEGFDKYNLEPVTRFAEFMEKELGLRVPRNKAVVGKNIFAHESGIHAAGVLKNPFNYEPYPPELVGGTRLLLIGDSSGLEVIRYKVQETLNNLLDVETVVEKDDRRLLKIQKEIQKLYDKEERVSCISDEELLAYVEKYFLYQPISDPARTGRGKLKNRGKIQEPVEEKE

SEQ ID NO: 431 - protein, 516 aa, Methanosarcina mazei Go1
MYTLKEGIDFYIEPMQSKKVTVFDTTLRDGEQTPGVSLTSTQKLEIAHQLDKLGVDIIEAGFPISSEGDKESVKSISNAGLDTTVCGLARVLKKDIDACFESDVGLVHTFVPTSDVQRIYTIKKSREEVIQLAVEAVQYIKDHGLKCMFSAMDATRTDPEYLIEVFKAVQEAGCDIINVPDTVGVMVPSAMYRQIKGIAAEITIPIDVHCHNDFGLAVANSLMAVEAGASQVQVTINGIGERAGNADLSQTVMSLTSIYGAKTNIRTEYLVETSKMVENYTGIRLPPNTPVVGQNAFSHESGIHSQGVLEKSDTFEPGIMTPEMVGHRRRIVLGKHTGKHAVKQSLESAGIKTNDNQLDEIVIRIKEIANKGKQITDADLYAVASAVLGKASSEEELIKLKEVSVMTGNILTPTAVVKADIEGKEIIAARTGVGPVDAALHAVRDILGESNHFRLQDFRIDAITGGADALADVYIGLENEKGRIVTARSANPDIVMASVEALVNAMNLLYKKENKS

SEQ ID NO: 432 - protein, 450 aa, Methanosarcina mazei Go1
MTFTGVLTSQFLIQASELFFRAVNTNIIKNNHKFLKPKKSRETATMSESEQYSRNTLMDFIDYRPLDIEICDVTLRDGEQTPGVVFSKEQKLAVASELDSMGIEVIEAGFPVVSADEKEIVKEIANQGFNSRICCLSRAVKGDVDAALECDVDIVSIFIAMSDMHLKYKYHRSLEDMLGCAKEAIEYATDHGLKVRFAAEDASRTPVERLKQAFKEVENEYKVQYVSLADTVGILNPTTTNYLVSEIFKSVNTAICIHCHDDLGMATANTLAAAEAGAKQLHTTVNAIGERAGNASLEEVLVALRVQYGIERYDTTKLNSLSEMVSEYSGITPSVNKAVVGKNAFTHESGIHVAAILEEPRTYELFLPEMVGGKRNLVVGKHTGKKALKGIINSIGFCLEREELCALIEKVKVCTEEKHKSISRDQLERLITQVKQEQKPSGSEKEKFSI

SEQ ID NO: 433 - protein, 520 aa, Xanthomonas campestris pv. campestris str. ATCC 33913
MNTTVSNQTPHIRIFDTTLRDGEQSPGCSMTPQQKLVMARALDALGVDIIETGFPASSYSDREAVAMMGRELRRPTLAVLSRCLQADIEISARALEAAANPRLHVFLSTSPLHREHKLRMSREQVLESVHKHVTLARGYIDDIEFSAEDATRTEEDFLAEVTRVAIAAGATTINLPDTVGFTTPEEIRGMFSRLIASVEGAEKVIFSTHCHNDLGLAAANSLAAIEGGARQVECTINGIGERAGNCALEEITMALKVRGAFYNLDTAINTPRIVSTSQLLQRLVGMPVQRNKAVVGGNAFAHESGIHQHGMLRHRGTYEIMRPEDVGWESSQMVLGRHSGRAAVEQRLRALGYLLEEDEAKLVFEQFKALCEKQRVVTDADLQALMQDATVQEGYRLASMTISDVGSRANALVELSDPDGNRVAETAQGNGPVDALFGALASATGVKLELDSYQVHSVGIGADARGEASLSVRHDGVEYEGTGTSKDIIEASALAWLDVANRLLRQRERGVVAGKTAAVA

SEQ ID NO: 434 - protein, 337 aa, Leptospira interrogans
GSHMGRSQKVSQMTKVETRLEILDVTLRDGEQTRGVSFSTSEKLNIAKFLLQKLNVDRVEIASARVSKGELETVQKIMEWAATEQLTERIEILGFVDGNKTVDWIKDSGAKVLNLLTKGSLHHLEKQLGKTPKEFFTDVSFVIEYAIKSGLKINVYLEDWSNGFRNSPDYVKSLVEHLSKEHIERIFLPDTLGVLSPEETFQGVDSLIQKYPDIHFEFHGHNDYDLSVANSLQAIRAGVKGLHASINGLGERAGNTPLEALVTTIHDKSNSKTNINEIAITEASRLVEVFSGKRISANRPIVGEDVFTQTAGVHADGDKKGNLYANPILPERFGRKR

SEQ ID NO: 435 - protein, 520 aa, Xanthomonas axonopodis pv. citri str. 306
MNTTVSNQTPRIRIFDTTLRDGEQSPGCSMTPQQKLVMARALDELGVDIIETGFPASSHSDREAVAMMGRELRRPTLAVLSRCLQADIETSAKALETAANPRLHVFLSTSPLHREHKLRMSREQVLESVHRHVTLARGYVDDVEFSAEDATRTEEDFLAEVTRVAIAAGATTINLPDTVGFTTPEEIRGMFSRLIASVEGADKVIFSAHCHNDLGLAVANSLAAIEGGARQVECTINGIGERAGNCALEEITMALKVRGAFYNIDSAINTPRIVSTSQLLQRLVGMPVQRNKAVVGGNAFAHESGIHQHGMLRHRGTYEIMRPEDVGWESSQMVLGRHSGRAAVEQRLRALGYLLEEEEVKLVFEQFKALCEKQRVVTDADLQALMQDATVQEGYRLASMTISDVGSRANALVELSDPEGNRVAETAQGNGPVDALFGALASATGVKLELDSYQVHSVGIGADARGEASLSVRHDGVEYEGTGTSKDIIEASALAWLDVANRLLRQRERGVVAGKTAAVA

SEQ ID NO: 436 - protein, 523 aa, Shewanella piezotolerans WP3
MSDRVIIFDTTLRDGEQALAASLTVKEKLQIALALERLGVDVMEVGFPVSSPGDFESVQTIARTVKNSRVCALSRALEKDIDAAAQALSVADQFRIHTFISTSTIHVESKLKRSFDQVLEMAVGAVKYARRFTDDVEFSCEDAGRTPIDNLCRMVEEAIKAGARTINIPDTVGYTVPSEFGGIIQTLFNRVPNIDQAVISVHCHDDLGLSVANSITAVQHGARQIECTVNGIGERAGNCSLEEIAMILSTRKGELGLETGINAKEIHRTSSLVSQLCNMPVQANKAIVGANAFTHSSGIHQDGMLKAQNTYEIMTPESIGLNRNNLNMTSRSGRHVIKHRMSELGYGDQDYDMDVLYEDFLVLADKKGQVFDYDLEALAFMEAQAEDDDHFKLQQLVVHSDSTEGSATATVKVEVNGETVTEAAIGNGPVDAAYKAVARASGCEIDITSYQLGAKGEGQNALGQVDITASYRNQNFHGVGLATDVVEASVKALVHVMNLTWRADKVADCKQKIQQEKQVLGGV

SEQ ID NO: 437 - protein, 192 aa, Zea mays
MEWTAPKRAASPPSPPLLWDWGGDHAGATGSGSGSSGDAPARRGGREREAKRARADDGEVRCQVEGCGLDLSRVKEYHRKHRVCEAHTKSPRVVVAGQERRFCQQCSRFHALSEFDQKKRSCRRRLSDHNARRRKPQPDAFAFASARLPSSSFDFPGRKRRGLLRKDKSISLFPDFPSCYLHNKFSNMIGGK

SEQ ID NO: 438 - protein, 509 aa, Staphylococcus aureus subsp. aureus MW2
MSSHIQIFDTTLRDGEQTPGVNFTFDERLRIALQLEKWGVDVIEAGFPASSTGSFKSVQAIAQTLTTTAVCGLARCKKSDIDAVYEATKDAAKPVVHVFIATSPIHLEHKLKMSQEDVLASIKEHVTYAKQLFDVVQFSPEDATRTELPFLVKCVQTAVDAGATVINIPDTVGYSYHDEYAHIFKTLTESVTSSNEIIYSAHCHDDLGMAVSNSLAAIEGGARRIEGTVNGIGERAGNAALEEVALALYVRNDHYGAQTALNLEETKKTSDLISRYAGIRVPRNKAIVGQNAFSHESGIHQDGVLKHRETYEIMTPQLVGVSTTELPLGKLSGKHAFSEKLKALGYGIDKEAQIDLFKQFKAIADKKKSVSDRDIHAIIQGSEHEHQALYKLETLQLQYVSSGLQSAVVVVKDKEGHIYQDSSIGTGSIVAIYNAVDRIFQKETELIDYRINSVTEGTDAQAEVHVNLLIEGKTVNGFGIDHDILQASCKAYVEAHAKFAAENVEKVGN

SEQ ID NO: 439 - protein, 399 aa, uncultured cyanobacterium
MPKFVFNHPNKTVCLGILNIKCMSNVYINDTTLRDGEQAAGIVFNAAEKVAIASLMDIIGIPELEVGIPAMGGSEAEAITGIVNSGLKASLLGWNRAVISDINASIACGLKRVHIAVPISDIQIKAKFKGKTAVVWERLKSTLNFALDKGLFVSVGAEDASRADESFLIEFAQYAQDLGASRFRFCDTVGILSPLTTTQKVKKLVKHLTIPIEMHTHNDFGLATANALAGIQAGATSVNTTVNGLGERAGNAALEEIVMALKQLYKVNLSINTSRLRELSQLIIQASGVKLPPWKAIVGDNIFAHESGIHAHGVLKDPQTYEPFAPEEIGWERRLVVGKHSGRSLLINLLSQHGINLDYEESQKILDSVRHLSVQMKRNLTTEELLDLVTNRRISHGIV

SEQ ID NO: 440 - protein, 231 aa, Lycopodium annotinum
MGRGKIEIKRIENATSRQVTFSKRRGGLLKKAHELSVLCDAQVALIIFSSTGKLFEYASPSMKEILDRYGKYPEGVQTGTVTDPNNDVMLQYLNREVIRMKQQIERTHQTQRHMMGEDLAILPLKDLQQLEEQLDIGLRRIRARKDQLLVEQLEELHRKERHWLEENEALRRKLAGGQALSGPVPSPLSIVNPLETREPPSLGTVSLPFSVQFNQQNMQDTPNLQTSLQLG

SEQ ID NO: 441 - protein, 237 aa, Lycopodium annotinum
MGRGKIEIKRIENATCRQVTFSKRRSGLLKKAHELSVLCDAQVAVIIFSSTGKLFQFASTRMKEILERYERNSDPLQIDAVIPRDLEYWSREAAKAKDELDRCHQKNRHMLGEDLSALNLNELEELEQQLDSGLRRVRCRKDQVLRDRIEELTKQESFLREENRMLRSKIAVPKESTEPILDEMNMETREPPSMAIVEEELSLKLNSKTWPDIHFSLQLGQYQPPRTETPTANHRPN

SEQ ID NO: 442 - protein, 234 aa, Lycopodium annotinum
MGRGKIEIKRIENSTSRQVTFSKRRGGLLKKAHELAVLCDAQVALIIFSNTGKLFEYASTSMKEILDRYRKYPDGIQTGRVMEYDNDVMVQHWSREVMRMKQQIERSYQTQRHMMGEDLGLLPLKELQHLEQQLDTGLNRVRARKDQVLREQIDSLRIKELQWHEENEILRRKIAGAHGMTEVAVRSFSSQNIVNPLETREPPSIGQVSVPFSLHVNQKNLRENQNLQTSLQLG

SEQ ID NO: 443 - protein, 376 aa, Chlorobium tepidum TLS
MIRKPWIIDTTLRDGEQAPGVVFSPHEKKRIAAMLAETGVDEIEVGYPAISAAERKVIREIVAMKLPVRLTSWSRANMADIELAAECGTDAVHISFPASRLYLELIHKKDDWIQEQLHALVSKARERFDFVSVGGQDATRSSTDFLQRFMLDAEAAGAKRFRIADTVGIATPVSVMALGAALRQSSSLPLEFHAHNDLGMATANAFTALNEGFEAVSVSVTGLGERAGNAALEELAMALALNGDFDTHLDTSMLSRLCDAVATASGRAIQEQKPVVGRSAFQHESGIHCAALLQDPLSYQPFLPSRVGRSDFEIVIGKHSGTAAIIAHFNRRGITISKKEARELLDLIRSQSDRLKRALRTDEIDALREQNSVKHA

SEQ ID NO: 444 - protein, 390 aa, Candidatus Tremblaya princeps
MARSRRRRIAILDTTLRDGEQAPCIVMGPDAKAEMARRLEIAGVDVVEAGFAASSSSDFEAIRRISCCVRGCVVCSLARAVGHDVRKAAKALEFARHPRIHVFIGSSSLHIEEKLRMHPLDVVDRAAAMVRLARAYCDDVEFSPEDSSRADPSFLCSLAKAAVEAGATIVNVTDTVGHGIPEQLSDVAGMLCRSVPISDRVTLSVHCHNDVGLALANTMAAIACCAGQAECTVTGIGERAGNAALEEVVVAAGLEYSGAGMDVRVDARHMRSIAQLASAIARRRLPATKPVVGCHAFAHASGIHQDGVIKNRRTYEALRAEDVGGRGGSIVLGKLSGTHALRNRLEGGGVTIGAMGVPRLATMMKGLASHLPVVYDSALAALHAIASRPC

SEQ ID NO: 445 - protein, 207 aa, Medicago truncatula
MATLIRTPFFSPTTFTSSNNNNQLLLLRLHSSKQPTHSSFPNFSISCSSQSQSQSPRHRPPYIPNHIPDPSYVRIFDTTLRDGEQSPGASMTSKEKLDIARQLAKLGVDIIEAGFPAASTDDFEAVKMIANEVGNAVDDNGYVPVICGLSRCNENDIQTAWNAVKHAKRPRIHTFIATSAIHMEFKLRMSKQHVIDKHAPWLHLHAV

SEQ ID NO: 446 - protein, 296 aa, Medicago truncatula
MSIEKEDFGLSLSLSFPQNPPNPQYLNLMSSSTHSYSPSTFNPQKPSWNDVFTSSDRDSETCRIEERPLILRGIDVNRLPSGADCEEEAGVSSPNSTVSSVSGKRSEREVTGEDLDMERDCSRGISDEEDAETSRKKLRLTKDQSIILEESFKEHNTLNPKQKLALAKQLGLRARQVEVWFQNRRARTKLKQTEVDCEFLKRCCENLTDENRRLQKEVQELRALKLSPQFYMQMTPPTTLTMCPSCERVAVPSSAVDAATRRHPMASNHPRTFSVGPWATAAPIQHRTFDTLRPRS

SEQ ID NO: 447 - protein, 416 aa, Medicago truncatula
MEFKLRMSKQQVIDKARTMVAFARSLGCQDVEFSPEDAGRSDREFLYQILGEVIKAGATTLNIPDTVGITMPSEFGKLIADIKANTPGVENVIISTHCQNDLGLSTANTIEGARAGARQLEVTINGIGERAGNASLEEVVMALKCGGHIFNNLFTGINTRHIYLTSRMVEEYSGLQLQPHKALVGANAFAHESGIHQDGMLKHKGTYEIISPEDIGLEGSNEAGIVLGKLSGRHAMRKRLEELGYELKDDQVESLFWRFKAVAEQKKRITDADLRALVSDEVFQAEPIWKLDDLQVTCGTLGLSTATVKLVGDDGSAHIACSVGTGPVDSAYKAVDLIVKEPATLLEYSMIAVTEGIDAIATTRVVIRGDTDQTSTHALTGESVQRTFSGTGAGMDVVVSSVKAYIAAINKMLSFK

SEQ ID NO: 448 - protein, 609 aa, Oryza sativa Indica Group
MASSLLSSPKPSSANPTSTPRPRAQTLSPFRAAAAPRFSHGLAAAANPSASRRCYHRAFARPVRASMAQPRRPEYVPNRIDDPNYVRIFDTTLRDGEQSPGATMTSAEKLVVARQLARLGVDIIEAGFPASSPDDLDAVRSIAIEVGNTPVGEDGHVPVICGLSRCNKRDIDAAWEAHKLRKTPEQVVAIAKEMVAYARSLGCPDVEFSPEDAGRSNREFLYHILKEVIKAGATTLNIPDTVGYTLPYEFGKLIADIKANTPGIENAIISTHCQNDLGLATANTLAGAHAGARQLEVTINGIGERAGNASLEEVVMAIKCRRELLGGLYTGINTQHITMSSKMVQEHSGLHVQPHKAIVGANAFAHESGIHQDGMLKYKGTYEIISPDDIGLTRANEFGIVLGKLSGRHAVRSKLVELGYEITDKEFEDFFKRYKEVAEKKKRVTDEDIEALLSDEIFQPKVFWSLADVQATCGTLGLSTATVKLIGPDGEEKIACAVGTGPVDAAYKAVDDIIQIPTVLREYSMTSVTEGIDAIATTRVVVTGDVSDSKHALTGHSFSRAFSGSGAALDIVVSSVRAYLSALNKMSSFVGAIKASSEVSESQRVQTTE

SEQ ID NO: 449 - protein, 239 aa, Oryza sativa Indica Group
MGRGKIAIKRIDNTTNRQVTFSKRRGGLMKKARELAILCDADVGLIVFSCTGRLYDFSSSRVFFDSLDDLKSGALFLKEKEMRSRSCMKSIIERYQEAGEEHCRLLNPMSEAKFWQREVTTLRQQVQNLHHNNRQLLGEEISNFTVRDLQLLQNQVEMSLHSIRNKKGSLVQKENSELRKKFNIAHQRNIELHKKLNSGESTSSEQVTRSSKDPGESSTPRDSRVCIDLELSQKEVEDE

SEQ ID NO: 450 - protein, 536 aa, Cyanothece sp. PCC 8801
MSNQPDRIIIFDTTLRDGEQSPGASLTVEEKLTIARSLARLGVDIIEAGFPYASPGDFEAVQKIAQTVGTEDGPRICGLARATQKDIQTAAEAVKPAAKGRIHTFLATSDIHLQYKLKKTRQEVLAIVPDMVAYAKSLVDDVEFSPEDAGRSDPEFLYQVLERAIAAGATTINIPDTVGYTTPSEFGALIGGIKQNVPNIDQAIISVHGHNDLGLAVANFLEAVKNGARQLECTINGIGERAGNAALEELVMALHVRRQYFNPFLGRPPESTEPLTNINTKEIYRTSRLVSQLTGMMVQPNKAIVGKNAFAHESGIHQDGVLKNKLTYEIMDAESIGLTHNQIVLGKLSGRNAFRTRLKELGFELSDTEINNAFLRFKEVADKKKEITDWDLAAIVNDEMQQAPELFRLELVQVSCGDHACPTATVTLRTPDGQELTDAAIGTGPVDAVYKAINRVVQVPNELIEFSVKSVTAGIDAMGEVTIRLRYEDKIYSGYAANTDIITASARAYISALNRLYGSIQDQSATEVTKSEVAAI

SEQ ID NO: 451 - protein, 377 aa, Cyanothece sp. PCC 8801
MDYVNINDTTLRDGEQAAGIVFTPDEKISLAVLMDAMGIPELEVGIPAMGGSEAQAITTIAKLGLKTDLLGWNRANRSDIEASIACGLRRVHISIPVSEVQIQAKFQGNCRVVLERLQDTLNFALDRGLFVSVGAEDSSRAVESFLLDVAGSAQDWGASRFRFCDTVGILDPATTTEKVGKLVQSVSIPIEMHTHNDFGLATANALAGLQAGATSVNTTVNGLGERAGNAALEEMVMALKQLYKVKLDINTRRLRELSQLVVTASGYQLPPWKAIVGDNAFAHESGIHAHGVLKNPQTYEPFAPEEIGMERRLVVGKHSGRHLVSNVLGQHGITLDREEAQFVLEAVRNLSVQMKRSLTVDELLELVPNRRVSHGII

SEQ ID NO: 452 - protein, 536 aa, Cyanothece sp. PCC 7424
MSNQPNRIIIFDTTLRDGEQSPGATLNGDEKLTVARALARLGVDVIEAGFPYASPGDFEAVQQIAKVVGVEGGPSICGLARATKADIAKAAEALKPAAKPRIHTFLATSDIHLAYKLKKTRQEVLEIVPEMVAYAKSFVDDVEFSPEDAGRSDPEFLYQVLERAIAAGATTVNIPDTVGYLTPSEFGQLIRGIKENVPNIDQAIISVHGHNDLGLAVANFLEAVKNGARQLECTINGIGERAGNAALEELVMALHVRRQYYNPFLGRPVDSTEPLTNINTKEIYKTSRLVSNLTGMAVQPNKAIVGANAFAHESGIHQDGVLKNKLTYEIMDAESIGLTNNQIVLGKLSGRHAFSTRLKELGFELSETDLNKAFLRFKEVADKKKEITDWDLEAIVNDEIQQAPEVFRLELVQVSCGDQARPTATVILRGPEGQELMDAAIGTGPVDAVYKAINRVVNVPNQLIEFSVKSVTAGIDAMGEVTIRLKYENRIFSGHAANTDIIVASARAYISALNRLYAAIEQEKAEKEKAAVTSAS

SEQ ID NO: 453 - protein, 382 aa, Cyanothece sp. PCC 7424
MRTIQINDTTLRDGEQSAGIAFTAPEKVALAILLDEIGIQELEVGTPAMGGAEAQAITEMTHLGLKSSLLSWNRAVRSDISASIACGIKRVHISIPVSDIQISAKFQGNCRLVLERLRDSINFALDKGLYVSIGGEDSSRADESFLLDVALCAQDWGASRFRFCDTVGILDPATTSEKVSKLVKALSIDVEMHTHNDFGLATANALAGLQAGATSVNTTVNGLGERAGNAALEEVVMALKRLYTIDLKINTRRLRELSQFVVKASGYPVPPWKAIVGKNVFAHESGIHVHGILQNPSTYEPFTPEEVGWERQLVIGKHSGRHTLLSLFQQHGIHLTREETQSILERVRHLSVQVKRGLTVEELLNLVSIKENSSWDCITPAK

SEQ ID NO: 454 - protein, 293 aa, Listeria monocytogenes str. 4b F2365
  misc_feature (1)..(1): Xaa can be any naturally occurring amino acid
  misc_feature (108)..(108): Xaa can be any naturally occurring amino acid
  misc_feature (114)..(114): Xaa can be any naturally occurring amino acid
  misc_feature (210)..(210): Xaa can be any naturally occurring amino acid
  misc_feature (280)..(280): Xaa can be any naturally occurring amino acid
  unsure (1)..(293): unsure at all Xaa locations
XSLKKIQFFDTTLRDGEQTPGVNFDVKEKIQIALQLEKLGIDVIEAGFPISSPGDFECVKAIAKAIKHCSVTGLARCVEGDIDRAEEALKDAVSPQIHIFLATSDVHXEYKLKXSRAEVLASIKHHISYARQKFDVVQFSPEDATRSDRAFLIEAVQTAIDAGATVINIPDTVGYTNPTEFGQLFQDLRREIKQFDDIIFASHCHDDLGXATANALAAIENGARRVEGTINGIGERAGNTALEEVAVALHIRKDFYQAETNIVLNQFKNSSDLISRLSGXPVPRNEGHHHHHH

SEQ ID NO: 455 - protein, 517 aa, Neisseria meningitidis Z2491
MTQANRVIIFDTTLRDGEQSPGAAMTKEEKIRVARQLEKLGVDIIEAGFAAASPGDFEAVNAIAKTITKSTVCSLSRAIERDIRQAGEAVAPAPKKRIHTFIATSPIHMEYKLKMKPKQVIEAAVKAVKIAREYTDDVEFSCEDALRSEIDFLAEICGAVIEAGATTINIPDTVGYSIPYKTEEFFRELIVKTPNGGKVVWSAHCHNDLGLAVANSLAALKGGARQVECTVNGLGERAGNASVEEIVMALKVRHDLFGLETGIDTTQIVPSSKLVSTITGYPVQPNKAIVGANAFSHESGIHQDGVLKHRETYEIMSAESVGWATNRLSLGKLSGRNAFKTKLADLGIELESEEALNAAFARFKELADKKREIFDEDLHALVSDEMGSMNAESYKFISQKISTETGEEPRADIVFSIKGEEKRASATGSGPVDAIFKAIESVAQSGAALQIYSVNAVTQGTESQGETSVRLARGNRVVNGQGADTDVLVATAKAYLSALSKLEFGSAKPKAQGSGTI

SEQ ID NO: 456 - protein, 514 aa, Desulfovibrio vulgaris str. 'Miyazaki F'
MTIESGRIRIFDTTLRDGEQSPGATMNLQEKIRLARQLETLGVDIMEAGFPASSQGDFEAVQAIARAVKGVEVAGLCRAMPADIDRAWEAVKVAENPRIHTFLATSPVHMQYKLRKEPDQVVEMAVAAVRHAAKYTSNVEFSAEDASRSNPDFLVRVFEAVINAGATTINVPDTVGYAQPEEFGRLIRYVIENTPNSHKAVFSVHCHNDLGMGVANTLAALKAGARQAEVTISGIGERAGNASLEEIVMALHTRRDFYQLDCGVVTEQLFPTCRLLSMIIGQPIPPNKAIVGANAFAHESGIHQDGMLKNRETYEIMTPESIGKTKTDLVIGKHSGRNAVKNKLDELGYRLEEAQLVTVFEAVKKLADKKKQIYDEDIEALVLEEVYRLPDLYRLVNLSVQCSDTGMPPTAAVVMDVMGEVKRAAGFGVGPIDAVFNVIGEIVGRAPVLERYSVTAITGGTDAQGEVTVRLRQNGSSAVGRGSDPDIILASARAYVNALNRLAKKEEEQEKEGI

SEQ ID NO: 457 - protein, 263 aa, Nicotiana benthamiana
MGSFDDISCTGLVLGLGFSTMADQKSTKIAPVVMAKGPSLGFEPSLTLSLSGDHTYNKQQAVKNDHQSADLYRQDSAASSYSNASVKRERDVGSEEATTEVERVSSRVSDEDDDGSNARKKFRLTKAQSALLEESFKQHTTLNPKQKQELARNLNLRPRQVEVWFQNRRARTKLKQTEVDCEILKKCCETLTEENRRLHKELQELKAVKIAQPLYMQRPAATLTMCPSCERIGGVGENTSKNPFTLAQKPHFYNSFTNPSAAC

SEQ ID NO: 458 - protein, 272 aa, Capsicum annuum
MGFDDICNTGLVLGLGFSSTTDQKSTKITPLASKGPASLTFEPSLTLSLISGDRTYEQQATKKVNVTKPSNDHQSADLYRQDSAASSYSNASVKRERDVGSEETTTEVERVSSRVISDEDDDGSNARKKLRLTKAQSALLEESFKLHSTLNPKQKQDLAMELSLRPRQVEVWFQNRRARTKLKQTEVDCEFLKKCCETLTEENRRLHKELQELKALKIAQPLYMQLPAATLTMCPSCERIGGGVGENPSKNPFTIAQKPHFYSPFNNPSAAC

SEQ ID NO: 459 - protein, 387 aa, Desulfitobacterium hafniense DCB-2
MEERKLTIVDTTLRDGEQTAGVVFSNQEKLMIARMLDDLGVHQIEAGVPVMGGDEQKAIRDIVKMGLKASIMGWNRAVIADIEKSIECGCDAVAISISTSDIHIEHKLMTTREDVLARMVKAAEFAKRNGLYISVNAEDASRSDLDFLLEFARQAKEAGADRLRYCDTVGILEPFTTFERITKLKETIDIDVEMHTHNDFGMATANALAGVKAGASHIGVTVNGLGERAGNAALEEIVMALKYLAGVDLKFATERFVEVSEFVARASGRSVPAWKAIVGSNMFAHESGIHADGALKNPLTYEVFKPEEVGLERQIVIGKHSGTAAIKAKFRNEYGKEISEEEANELLARVRAFAVDMKRSLFDKELMYIYEDLHREAENRQPNPKWF

SEQ ID NO: 460 - protein, 516 aa, Buchnera aphidicola (Cinara cedri)
MNEKIIIFDTTLRDGEQALLTSLTSNEKIQIALALERLGVDVIEVGFPVSSPGDFKSVQMLSKIIKNSKICSLARCLPNDITIAADAMQFSKNFRIHLFLGTSDLHVSSKLKKNFNEIIEMAVASVKQAKKFTNDIEFSCEDAGRTTLQNLYCIIEAVIKAGATTVNIPDTVGYTTPTQFKKIITMLFNHVKNIHQAIISVHCHNDLGMAVANSISAVEAGVRQIEGTMNGLGERAGNAALEEVIMTLNVHKNSLKVSTDINIKEIHRTSKIVSQFCNTPIPLNKAIIGKNVFSHSSGIHQDGVLKNRKNYEIIDPNSIGFTDYCSLNLTSRSGRAAVKHHMKKMGYENSDYNLNELYIDFLKLADKKGRIFDYDLEALAFFKKQQNTEEYYKLEYFDVQSKLSGLSTAYIVLICGSQTNIQKATTYNGPVDAIYQALNKATLYSIVLKKFHLEANGEGKDALGKVNIIVQYKLRNFHGVGLATDIIEASAQAMVNVLNYIWKSQQVNKELERLQK

SEQ ID NO: 461 - protein, 375 aa, Buchnera aphidicola (Thelaxes suberi)
GRTSIDNLCRIVESAIKAGATTINIPDTVGYTIPSQFKTIIKNLFNKVPNINNAIISAHCHDDLGLAVGNAIASIEAGVRQIEGTISGIGERAGNTALEEVILTIKLKEELLNVFTNIKHNELYRTSQLISQLCNTPIPANKSIIGSNAFAHSSGIHQDGILKNRANYEIIDPKTIGVKAVQLNLTSRSGRAAVKHHMHEMGYQDDDYDLNQLYVNFLKLADKKGQVFDYDLEALAFISNQEDKDQEHFQLKYFSIHSGSTGVSTASVKLLCGNKILNEIITTRNGPINSIYQALNNIAGLPIVLEKFHLVGKGEGRDALGQVDIVVKYNNRKFHGIGLATDIIESSIKAMLNVLNNIWLSNKIKSKIKNIKNKK

SEQ ID NO: 462 - protein, 515 aa, Buchnera aphidicola (Pemphigus spyrothecae)
  misc_feature (227)..(227): Xaa can be any naturally occurring amino acid
  unsure (1)..(515): unsure at all Xaa locations
MGEKIIIFDTTLRDGEQALQASLTTKKKLKIALSLEEMGIDIIEAGFPISSPGDFKSVETISKEFKSSIICSLARCVEKDIDIAAEAMRFAKHFRIHIFLGTSPLHVKSKLKKNFSEIIDMAIFAIKKAKRYTBDIEFSCEDAGRTPINQLCYIVENVIKAGATTINIPDTVGFTIPYEFNQIIKSLYNKVPNIDKVILSVHCHNGLGMATANSITAIQAGARQIEXTMNGMGERAGNTALEEVIIAIKLKKNNLNLHTNIKHKKIYKTRKLISEICNTVIPSNKAIIGTNAFSHSSGIHQDGILKNRKNYEIITPKSIGLKPIKLNLTSRSGRAAVKYHMTEMGYDEKLYKLDILYNSFLKLADRKGQVFDYELESLAFIDQKENTTEHFRLKKFNVQHQSTGITISSIELYCGKKIKTANTRTKKGLVNSIYITLNKITNLPIYLKNIQLITQKKPINIIISIKVQIEYKKRQFYGIGNSKDIVESTAQAMIHILNNIWKANKVNILLKNIKT

SEQ ID NO: 463 - protein, 515 aa, Geobacillus stearothermophilus
MRNIKFFDTTLRDGEQSAGVNLNLQEKLEIARQLERLRVDIIEAGFPASSKGDFEAVKQIAETVRTCSVTGLSRSVRSDIDAAWEALKGGAEPRLHLFIATSPIHMVHKLRMTPEQVIEAAVEAVKYAKRFFPIVQWSAEDACRSELPFLAKIVAEVIKAGASVINIPDTVGYITPKEYGEIFLYLQNNVQNIENVSLSAHCHDDLGMAVVNSLSAIEHGATQVECTINGIGERAGNAALEEIAVALHIRKDYYQVETRLNLQEIKRTSNLVSKLTGVVVPPNKAVVGKNAFAHESGIHQDGVLKEKTTYEIISPELVGVPSNSMVLGKNSGRHALRYRVEELGYTLSDEEINQLFVRFKELADKKKDITDDDLIALIFEEKFDHFKDFYQLSSIQVQYGTNQIPTAVVVLKYGKGNEIQEAATGSGSVYALYNTLERCFQTEVTLLDYRIESVGGGRDALAQVFVKVRVRDVETSGRGTAQDVLEASAKAYINAMNRVFMIEAMRAENEKVATS

SEQ ID NO: 464 - protein, 437 aa, Buchnera aphidicola (Uroleucon rurale)
EKLQIALSLEKIGVDIMEVGFPISSPGDFKSVQTISKNIKNSRICSLARCLEKDIDAAGEAMSVCDNFRIHIFLATSTLHIESKLRKNFNEIIEMAIFSVKKALRYTNDVEFSCEDASRTNIDNLCRIVEKLIKSGVKTINIPDTVGYSTPDELTFIIKNLFERVPNIHKSIISVHCHDDLGMAVGNSIAAIQAGARQIEGTINGIGERAGNTALEEVIMAIKVRKNILGVSTNINHKEIYRTSQMISRICNMPIPSNKAIVGSNAFSHSSGIHQDGVLKNRENYEIMDPRSIGLKKVKLNLTSRSGRAAVKYYMSEMGYKDSDYNIDELYTDFLKLADKKGQVFDYDLESLAFINKQQDELEYFRLQFFSVQSISNNLSTASVKLLCGNKTYTESSTTSNGPVDAIYQALNRITHFPIILQKFQLIAKGKGKDALG

SEQ ID NO: 465 - protein, 502 aa, Buchnera aphidicola (Macrosiphoniella ludovicianae)
DGEQALQASLSVKEKLQIALCLEKIGVDIMEIGFPISSPGDFKSVQIISKNIKNSRICSLARCVEKDIDAAGEAMSASNSFRIHIFLATSTLHMEYKLKKNFHEIIDMAIFAVKRALRYTDDIEFSCEDASRTTIDNLCRIVEKLIYHGVKTINIPDTVGYTVPNELSYIIKNLLERVPNIHKSIISVHCHDDLGMAVGNSISAIQAGARQIEGTINGIGERAGNTALEEVIMAIKVREDILGVSTNINYKEIYHTSKIISRICNMPIPPNKAIVGSNAFSHSSGIHQDGVLKNRKNYEIIDPSSIGFKKLKLNLTSRSGRAAVKYYMSEMGYKDTDYNIDELYADFLKLADKKGQVFDYDLESLAFISKHPEELEHFCLKFFSVQSISNGLSTASIKLLCGQKLYIESSTTSNGPVDAIYQALNKITNFPIILQKFQLIAKGKGKDALGQVNILIEYKKRKFHGIGLATDFIESSAKAMVNVLNNIWQAEQVNKKLQELKK

SEQ ID NO: 466 - protein, 503 aa, Buchnera aphidicola (Uroleucon ambrosiae)
DGEQALQASLSVKEKLQIALCLEKSGVDIMEVGFPISSPGDFKSVQTISQKIKNSRVCSLARCIEKDIDVAGEAMSASNSFRIHIFLATSTLHMESKLRKNFNEIIDMAIFSVKRALRYTDDIEFSCEDASRTTIDNLCRIVEKLISCGVKTINIPDTVGYTIPNELSFIIKNLFEKVPNIHKSTISVHCHDDLGMAVGNSISAIQAGARQIEGTINGIGERAGNTALEEVIMAIKVREDILGVSTNINHKEIYRTSQIVSSICNMPIPSNKAIVGSNAFAHSSGIHQDGVLKNRENYEIIDPISIGLKKVKLNLTSRSGRAAVKHYMNEMGYKENDYNIDELYTDFLKLADKKGQVFDYDLEALAFINKQQDESEYFSLKFFSVQSISNNLSTASVTLLCGKKIYTEASTTSNGPVDAIYQALNRITHFPIVLQKFQLVAKGKGKDALGQVDILVEYKKRKFHGVGLATDIMESSAKAMVNVLNNIWKAKQVNKNLKNLKKQ

SEQ ID NO: 467 - protein, 503 aa, Buchnera aphidicola (Uroleucon erigeronensis)
  misc_feature (17)..(17): Xaa can be any naturally occurring amino acid
  unsure (1)..(503): unsure at all Xaa locations
DGEQALQASLSVEEKLXIALCLEKTGVDIMEVGFPISSPGDFKSVQTISKKIKNSQICSLARCIEKDIDIAGEAMSVCDFFRIHIFLATSRLHMKSKLRKNFDEIIDMAIFSVKRALRYTDDVQFSCEDASRTTIDNLCRIVEKLINSGVKTINIPDTVGYSIPNELSFIIKNLFQRVPNIDKAVISVHCHDDLGMAVGNSISAIQAGARQIEGTINGIGERAGNTALEEVIMAIKVREKNLGVYTNINHKEIYRTSQMISRICNMPIPSNKAIVGSNAFSHSSGIHQDGVLKNRENYEIIDPVSIGLKNVQLNLTSRSGRAAVKYYMNEMGYKDSDYNIDELYSDFLKLADKKGQVFDYDLESLAFISKQQDELEYFCLKFFSVQSISNGLSTASVKLLCGKKVYTESSTTSNGPVDAIYQALNRITHFPITLQKFQLIAKGKGKDALGQVDILVEYKKRKFHGVGLATDIIESSAKAMINVLNNIWKAKQVNKKLKILKKK

SEQ ID NO: 468 - protein, 502 aa, Buchnera aphidicola (Uroleucon sonchi)
  misc_feature (418)..(418): Xaa can be any naturally occurring amino acid
  unsure (1)..(502): unsure at all Xaa locations
DGEQALQASLSVKEKLQIALCLEKAGVDIMEVGFPISSPGDFKSVQTISQNIKNSRICSLARCIEKDIDTAGEAMSHCDFFRIHVFLATSTLHMESKLRKNFDEIIDMAIFSVKRALRYTDDVEFSCEDASRTTMDNLCRIVEKLISCGVKTINIPDTVGYTIPNELSLIIKNLFERVPNIHKSTISVHCHNDLGMAVGNSISAIQAGARQIEGTINGIGERAGNTALEEVIMAIKVREDILGLSTNINHKEIYRTSQVISRICNMPIPSNKAIVGSNAFSHSSGIHQDGVLKNRENYEIMDPSSIGLKKVKLNLTSRSGRAAVKYYMNEMGYKDSDYNIDELYVDFLKLADKKGQVFDYDLEALAFINKKQDELEHFCLKFFSVQSISNNLSTASVTLLCGDKIYTESSTTSNGPVXAIYQALNRITHFPIILQKFQLIAKGQGKDALGQVDILVKYKKRQFHGVGLATDIIESSAQAMINVLNNIWKVKQVNKNLKNLKK

SEQ ID NO: 469 - protein, 520 aa, Aquifex aeolicus
MGEKVYIFDTTLRDGEQAPGFSMTTEEKLQMAHQLAKLNVDIIEAGFAAASKGDFEAVNRIAKEVKGPVICSLARALESDIEIAAKALEPAERKRIHTFIATSPIHMEYKLRMTPDQVLERIKKAVSFARNFTDDVEFSCEDATRSEREFLYRAIETAIKHGATVINIPDTVGYAIPEEFGQLIEDIMNNVPNIDKVILSVHCHDDLGLATANSLTAVKHGARQVECTINGIGERAGNAALEEVVMALKVRKDFFGDLYTDVNTKEIYKTSRLLCRITGNFVQPNKAIVGDNAFAHESGIHQHGVLSHRMTYEIMNPEDVGFPMSRIVLGKHSGRHALKRRLEELGFKFTKEELDRIFEKFKELADRKKEVYDEDLEALIYQEFMKIEDHEPVKVLHFQVQSGDNMIPTATVKLEFKGEEREASSTGNGPVDATIKAIQKALGIEPKLLDYSIKALTPNTDAQAEARVVLELDGVKASGRGVDTDIIKASVKAFTDALNRAIVRKEYIIQRQEIREEGTV

SEQ ID NO: 470 - protein, 398 aa, Methanocaldococcus jannaschii
MDFLFENSWKAVCPYNPKLDLKDIYIYDTTLRDGEQTPGVCFTKEQKLEIARKLDELGLKQIEAGFPIVSEREADIVKTIANEGLNADILALCRALKKDIDKAIECDVDGIITFIATSPLHLKYKFNNKSLDEILEMGVEAVEYAKEHGLFVAFSAEDATRTPIEDLIKVHKAAEEAGADRVHIADTTGCATPQSMEFICKTLKENLKKAHIGVHCHNDFGFAVINSIYGLIGGAKAVSTTVNGIGERAGNAALEELIMALTVLYDVDLGLNLEVLPELCRMVEEYSGIKMPKNKPIVGELVFAHESGIHVDAVIENPLTYEPFLPEKIGLKRNILLGKHSGCRAVAYKLKLMGIDYDREMLCEIVKKVKEIREEGKFITDEVFKEIVEEVLRKRNKN

SEQ ID NO: 471 - protein, 248 aa, Mirabilis jalapa
MLMMQLPREHSQEVTTEADVFEHHLLSDPEEEEEEEEEDDDGNQLSAGKKKKSCKNKRRFSDEQVRSLETIFATETKLEPKKKVQVAKELGLQPRQVAIWFQNKRARWKSKQIEKNYRVLKTNYDSLKVKFETMKEEKESLLKQLQELQNLLEKSNKSENSDCKDNSAVIGAELPVKSISLQDEVDHQGIIYSDDDRSGNMAYLGHDEPELMHFNDNMDCSSIKWCNFDAGNFFDQSNTATYWWDSWI

SEQ ID NO: 472 - protein, 405 aa, Methanosarcina mazei
MSESEQYSRNTLMDFIDYRPLDIEICDVTLRDGEQTPGVVFSKEQKLAVASELDSMGIEVIEAGFPVVSADEKEIVKEIANQGFNSRICCLSRAVKGDVDAALECDVDIVSIFIAMSDMHLKYKYHRSLEDMLGCAKEAIEYATDHGLKVRFAAEDASRTPVERLKQAFKEVENEYKVQYVSLADTVGILNPTTTNYLVSEIFKSVNTAICIHCHDDLGMATANTLAAAEAGAKQLHTTVNAIGERAGNASLEEVLVALRVQYGIERYDTTKLNSLSEMVSEYSGITPSVNKAVVGKNAFTHESGIHVAAILEEPRTYELFLPEMVGGKRNLVVGKHTGKKALKGIINSIGFCLEREELCALIEKVKVCTEEKHKSISRDQLERLITQVKQEQKPSGSEKEKFSI

SEQ ID NO: 473 - protein, 520 aa, Yersinia pestis KIM
MSQQVIIFDTTLRDGEQALQASLSVKEKLQIALALERMGVDIMEVGFPVSSPGDFESVRTIAQQVKNSRVCALARCVDKDIDVAAEALRIAEAFRIHVFLATSTLHIESKLKRSFDDVLAMAVHSVKRARNYTDDVEFSCEDAGRTPIDNLCRVVEAAITAGATTINIPDTVGYTPPYQFGGIITDLYERVPNIDKAIISVHCHDDLGMSVANSITAVQAGARQVEGTINGLGERAGNCSLEEVIMAIKVRHEMLGVHTNINHQEIYRTSQLVSKICNMPIPGNKAIVGSNAFAHSSGIHQDGVLKNRENYEIMTPESIGLKEVQLNLTSRSGRAAVKHRMEEMGYQDKDYNLDSLYDAFLKLADKKGQVFDYDLEALAFINKQQEEPEYYRLDYFSVQSGSSVMATASVKLVCGEEIKSEAATGNGPVDAVYQAINRITDYPIELVKYQLSAKGQGKDALGQVDIVVDHKGRRFHGVGLATDIVESSAKALVHVLNNIWRAHQVEKEKQRLQQNNQEMV

SEQ ID NO: 474 - protein, 512 aa, Thermomicrobium roseum DSM 5159
MSDRLIIFDTTLRDGEQSPGATMTEDEKIEVARQLVKLGVDVIEAGFPAASPGDLRAVQRISREVKGVTICALARANQQDIDAAWEGVRDAEQPRIHTFIATSPIHMEYKLRKTPEQVLEAARFAVRTAKRYVSDVEFSAEDATRSDWDFLCRVFAAAIEEGATTINIPDTVGYAVPHEFAELVRYVTEHTPGIEKVTVSVHCHNDLGLATANTLAAIRVGARQAEVTINGIGERAGNTALEEVVMALHVRRDVFGGILPRVVTEQIVPTSKLVQRITGIQVQPNKAIVGANAFAHEAGIHQDGMLKHRMTYEIMTPQSVGWEASRLVLGKHSGRAGFTARLKELGYGDLSRERIEQLYQRFIDLCDRKKTVTDADIIAIVEDQLAQVPQRYTLKGWRAHSGSDGRAEAWVKLEIDGVEREASASGNGQIDALFKAIDRLVGRHCELEAFHVDAVSPGEDAQGQVTVHLRCGTQVYNGRGVATDVIEASLRAYLMALNRAALTTPVSVSGGE

SEQ ID NO: 475 - protein, 513 aa, Thermotoga neapolitana DSM 4359
MRRIKIFDTTLRDGEQSPGASMSVEEKVEMALMLEDLGVDLIEAGFPVSSPVQFEAVKRVAEAVQRPIVVGLARCVEKDIDAAYEALKDRPKDKRMIHVFIATSPIHRKYKLRMEKEEILERVRKYVTYARQFFDLVEFSAEDASRTEVPFLIEVYRTAIESGATTINVPDTVGYALPDEFGELIRTLKEGVPGIENVDLSVHCHNDLGLAVANSIAAVQNGATQVEVTLNGIGERAGNCALEEFVMALKVRKDRLPYETGIRTELIYPASRLLTHITGLIPARNKPIVGENVFLHESGIHQDGVLKHRETYEIMKPSDIGRSSETLVLGRHSGKHALRKKLESYGIKLDDETFQKVFEKFTELADRKKEVYDDDLFSIVSEVLKEPLNGYRLVHFHVHTGNTLLPTAAVVLQVGNEKKEAAETGNGPVDAIFKAIDKALGLQPKLEEYIIQAVGTGKNAQGEVKLTLKIDGELYSGRGVSTDIVEASAIAYINAINKYLIAKGLLRKNGGVE

SEQ ID NO: 476 - protein, 491 aa, Arabidopsis thaliana
KTIAETVGNTVDENGYVPVICGLSRCNKKDIETAWEAVKYAKRPRIHTFIATSDIHLKYKLKKSKEEVIEIARNMVRFARSLGCEDVEFSPEDAGRSEREYLYEILGEVIKAGATTLNIPDTVGITLPSEFGQLIADIKANTPGIQNVIISTHCQNDLGLSTANTLSGAHSGARQVEVTINGIGERAGNASLEEVVMAIKCRGDHVLGGLFTGIDTRHIVMTSKMVEEYTGMQTQPHKAIVGANAFAHESGIHQDGMLKHKGTYEIMSPEEIGLERSNDAGIVLGKLSGRHALKDRLNELGYVLDDGQLSNLFWRFKAVAEQKKRVTDADLIALVSDEVFQPEAVWKLLDMQITCGTLGLSTSTVKLADSDGKEHVACSVGTGPVDAAYKAVDLIVKEPATLLEYSMNAVTEGIDAIATTRVLIRGDNNYSSTNAVTGESVERTFSGTGAGMDIVVSSVKAYVGALNKMLGFKEHTSTLSKTPLETNEVPA

SEQ ID NO: 477 - protein, 252 aa, Eucalyptus camaldulensis
MCPIDSGRSFDTSLSLGLGCYGDPEDHEIKIKKPLAKLSGNSTCLTIGLPGGEACGLGSASGDEVRNIPSRSASSFSNSSSAKREKAEQGEEEAVERGTGSPRATINIEDEDEFSPRKKLRLSKAQSSILEESFKAHTTLNTKQKHDLANRLNLRPRQVEVWFQNRRARTKLKQTEVECEMLKKCCETLKEENRRLKKELQELNSLKPTASVYRQIPAAALPLCPSCERIAHPEFPFSTESRLWPAHPSAAC

SEQ ID NO: 478 - protein, 442 aa, Oryza sativa Japonica Group
MDWMPPPKPTSPRSPPLLWDWADAAVPGSSSGEVSAAAAAAAAHPGRRRKEKRGRAEEGGGGGGEVRCQVEGFGVELVGVKDYHRKHRVCEAQSKFPRVVVAGQERRFCQQCSRFHALSEFDQKKRSCRRRLYDHNARRRKPQTDVFSYASARPPSSLLFDDNRQISFVWNKAPLSHVRPFAISPWESSSEVGTTDGHIYLDKSHISKSLPAFNTDIDELLPMKGPDASLTASKFDGAPDLQRALSLLSSSSCGLPDPVQQASRVIQFTGASQNNRELPPLNGGNSASASCANVQTIAQPAQLDLLKCKVCETGANNEGKKSQTDACELANKLQENAQHIHMLLKEEAGENENHNLAISSDSMETTRQKGDELIKSLGGLVSYLNQFTDLIKENGFENVVGLWQTLLPALASPFLSAIVYFSVWQSAVLGRFSALYSRIPGF

SEQ ID NO: 479 - protein, 535 aa, Thermosynechococcus elongatus BP-1
MRIKYPPQTVDRVLIFDTTLRDGEQSPGASLNVDEKLTIARQLARLGVDIIEAGFPFASPGDFEAVQRIAETVGTETGPVICGLARATRQDIEAAAKALKPAYYPRIHTFIATSDIHLEYKLRKTRAEVLEIAQEMVAYAKSFVDDVEFSPEDAGRSDPEFLYEVLERVIDAGATTVNIPDTVGYTTPAEFGALIKGIKENVPNIDRAVISVHGHNDLGLAVANFLEAVKNGARQLECTINGIGERAGNAALEELVMALYVRRQYFNPFLGRPPESEAPLTNINTREIYKTSRLVSNLTGMLIQPNKAIVGANAFAHQSGIHQDGVLKHKQTYEIMDAQLIGLADNQIVLGKLSGRNAFATRLRELGFELSETELNKAFLRFKDLADKKKEITDWDLEAIAKDETQGIDLQGYQLEFVQVSCGDHARPTATVTVRTPSGEELTDAAIGTGPVDAVYRAINRVVQIPNRLIEYSVQSVTAGIDAIGEVTIRLQHQDRIYSGHAANTDIIVASAQAYMNALNRLYRGLEQRALHPQA

SEQ ID NO: 480 - protein, 520 aa, Streptococcus suis 89/1591
MRVIEFLDTTLRDGEQTPGVNFSIKEKVTIAKQLEKWGISAIEAGFPAASPDSFEAVRQIAAAMTKTAVTGLARSVKSDIDACYEALKDAKYPQIHVFIATSPIHREFKLQKTKEEILAQITEHVSYARERFEVVEFSPEDATRTELDYLLEVVQTAVDAGATYINIPDTVGFTTPQHYGEIFRHLITNVKSDREIIFSPHCHNDLGMAVANTLSAIKNGAGRVEGTINGIGERAGNAALEEVAVALEIRKDFYDVTSPIVLKEMLNTSELVSRFSGIAIPRNKAVVGGNAFSHESGIHQDGVLKNPLTYEIITPELVGVKKNSLPLGKLSGRHAFVEKLKELDLYFEEGDVASLFARFKNLADKKEKITDADIRALVAGTEISNRDGFQFKDLRLDSQSDGSIQAQVIFINQDEEEVVVAESGKGSVEAVFNAVDQFFHQEISLERYHIDAITDGIDAQARVLVAVENKATETIFNASGIDFDVVKASAIAYIHANVMVQKENSGQIDKKLSEKELPTS

SEQ ID NO: 481 - protein, 482 aa, Zea mays
MGSFGMDMDWNQKASVLLWDWENLPPAAANGSESHRTTAAAPQFAGLEATGHEPAPSSVSSSIHSLPSAKGNKNKNNMELISFAPAKAPDKDTGSVLSSGEPVVLGLKLGKRTYFEDGCGLGQSGKSSAALGTASAATPPGPAKKAKAAAAAPTAQQQKSYCQVEGCRTDLSSAKDYHRKHRVCEPHSKAPKVVVAGLERRFCQQCSRFHGLAEFDQKKKSCRRRLNDHNARRRKPQPEALPFGSSRLSAMFYDTRRQASLLFGEGPYGQMRSCASSWWDSPGAGGGGFKFAETRGAPWLKPARAAADGLLPLSGQQQQQVWNDSIPHVAHQEDFDGFTVTAFKGISPKTLDHQGAGVEACAAVSSPDGAPDLQRALSLLSNSPAGGGGTNTNHPPPPPAAELHHHRAAPSSCLAAGSVSVLQEASSPGLWQDGGGSAALGHHAHARLQALDAAMATAQELLQLPRPPPSYGGSSSHYDLMR

SEQ ID NO: 482 - protein, 488 aa, Zea mays
MGSFGMDMDWNQKASVLLWDWENLPPAAANGSESHRTTAAAPQFAGLEATGHEPARSSVSASIHSLPNAKGKKNKNNMELISFAPAKGPDKDTGSVISSGEPVLGLKLGKRTYFEDGCGLGQSGKSSPALGTASAATPPGPAKKAKAAAAAPTAQQQKSYCQVEGCRTDLSSAKDYHRKHRVCEPHSKAPKVVVAGLERRFCQQCSRFHGLAEFDQKKKSCRRRLNDHNARRRKPQPEALPFGSSRLSAMFYGSSDKHWVLASSSCEGPYGQMRSCASSSWDSPGAAGGGGFKFAETRGAPWLKPARAAADGLLPLSGQQQQQQVWNDFMPHVAHQEDFDGFTVTAFKGISPKTLDHQGAGVEACAAVSSPDGVPDLQRALSLLSNSPAGGGGTNTNHPPPPPAAELHHHGAAPSSCLAAGSVSVLQEASSPGLWQDGGDSAALGHHAHAHARLQALDAAMATAQELLQLPRPPPSYGGSSSHYDLMR

SEQ ID NO: 483 - protein, 658 aa, Thalassiosira pseudonana CCMP1335
MRIYAASLALALSYACSTSAFTPSKHPSVTRSTHRPAAAVIAIASRSPTTTSLSSSISEDPAIQELYRRRPRPEYIPGKISDPDYVRIFDTTLRDGEQSPGATLTSSEKLEIARNLAKLGVDIIEAGFPIASPDDFNGVKQIADVVGNEVFEDGYVPVIAGLSRANEKDIARAWDAVKGAMRPRIHTFIATSEIHMKSKLNKTPDEVVEIAVNAVTFAKGLGCDDIEFSPEDAGRSDPEFLYRILGRVIEAGATTLNIPDTTGWNMPWEFGELIKKLRENVPGAENVVFSTHCQNDLGLATANSLSGALNGARQLECTINGIGERAGNASLEEVVMSLALKGDEQFKGGPGTGKLYTAINPVYITPTSKMVSEYTGMKCQPHKAIVGANAFQHESGIHQDGMIKDKSTYEIMTPESIGLMRGESQSGAGIVLGKHSGRNAVGTRLREMGYDLDMDKLNAVFARFKEVAEKKKGGLDDDDLESLVMDQSQSTNELWKVTGLQTTTGISGIPTSTVKMMGPDGVERFVSATGTGPVDAVYKAIDQIMGVSVELESYSMNSVNEGIEALASTRVVIVPNANGPNDSVVMDAQTSQLRERKFSGSGSDTDIITSSARAYVSALNKLLTWQMRRVANGASDANDSGIGDAVAVEGHGPVVVAN

SEQ ID NO: 484 - protein, 80 aa, Populus trichocarpa
CQVEGCNLDLSSAKDYHRKHRVCESHSKCQKVIVAGLERRFCQQCSRFHGLSEFDEKKKSCRRRLSDHNARRRKQPGSVH

SEQ ID NO: 485 - protein, 398 aa, Populus trichocarpa
MENGGNKGQENDHANLAWDIWELNTSRFDLVDSNNTTAAAGITTNTTTASVVENGSSTHPEANSAHGFLFPNRNSWLYHHNNSNSYQQLSLYAGDGSILHPDPHLMCLKLGKRHYFEDSTSNNNINPISDRHVVGGFSVGKRGKPYYTVSGGANDEPSSSSSVNVPRCQVEGCHVALVNAKGYHRRHKVCEMHSKAAKVIVLGLEQRFCQQCSRFHVVSEFDDAKRSCRRRLAGHNERRRKGSLDSVSRNASHDKLIAGRFPYIASPTGCALSLLSSKADSWVSPSDLSSRSSAALRELIAEHRAAIPARQLILEKHSHNHAMGESQPSSNFFITHQQQMLSEPHNWGRFNGTTMHVTLDLMQAPSSAFGFLSARGKNKEEGGECSQLWSTLEGAHAV

SEQ ID NO: 486 - protein, 233 aa, Populus trichocarpa
MSSVSLMEWNGKPHLQWDWENLIMFNAITNENSKQLSLTDLETDGEKGNDSGFFYSSGSVSRSRGSISDLELASFSKSSKSASTNSSSAGEVKTSKFTLGASKTNPSDYNKEELVKAKATDTSPTLEASVGSGDQLLGLKLGKRTYFEDACAGSNAQSSSISTIPVPSFTPAKKLKSSNHSQRAPRCQVEGCNLDLSSAKDYHRKHRVCESHSKCPKVIVAGLERRFCQQCSR

SEQ ID NO: 487 - protein, 558 aa, Populus trichocarpa
RPVYVPNKIPDPNYVRIFDTTLRDGEQSPGATLTSKEKLDIARQLAKLGVDIIEAGFPAASKDDFEAVKMIANEVGNQVDSEGYVPVICGLSRCNEKDIRAAWEAVKNAKRPRIHTFIATSGIHMEYKLRKSKEEVVEIASSMVRFARSLGCDDVEFSPEDAGRSEREFLYHILGEVIKAGATTLNIPDTVGITTPSEFGQLIADIKANTPGIENVIISTHCQNDLGLSTANTLSGACAGARQVEVTINGIGERAGNASLEEVVMVIKCRGEHVLGGLYTGINTRHITMASKMVEEYTGLHVQPHKAIVGANAFAHESGIHQDGMLKHKGTYEIISPEDIGLERSNDAGIVLGKLSGRHALKDRLNELGYELDDAQLGNIFWRFKAVAETKKRVTDADLIALVSDEVFQPENVWKLHDLQVTCGTLGLSTATVKLLSADGEEHVACSLGTGPVDSAYKAVNLIVKEPVTLLEYSMIAVTEGIDAIATTRVVIRGENQHAPTHALTDEPFQRTFSGSGAGMDIVVSSVKAYVGALNKMLAFKQQPSMKRVSTERTPVSA

SEQ ID NO: 488 - protein, 92 aa, Populus trichocarpa
TATTKRSRASYPSTQSPRCQVEGCNLDLKSAKDYHRRHRICEKHSKSPKVIVAGMERRFCQQCSRFHELSEFDDKKRSCRRRLSDHNARRRR

SEQ ID NO: 489 - protein, 100 aa, Populus trichocarpa
EDDFVNRLYRRSRPLDPGSSSNAPRCQAEGCNADLTHAKHYHRRHKVCEFHSKASTVIAAGLTQRFCQQCSRFHLLSEFDNGKRSCRKRLADHNRRRRKS

SEQ ID NO: 490 - protein, 597 aa, Chromobacterium sp. 2002
MQLDIERLIANFGGPSELAEALNAAFPDEPVSRAAIYKWRERGSLPLAQLNKLAQLAASQGRRFDFNDYLSGTAVVPGQGKGFNMGDRLYIFDTTLRDGEQSPGASMTKEEKIRIARQLERLGVDVIEAGFAAASPGDADAIHAIAEVIKESTVCSLARANERDVRAAGEAIKPAVKGRIHTFIATSPIHMEKKLRMTPDQVVEAAVKAVKIAREYTDDVEFSAEDALRSDIDFLARIFGAVIEAGATTLNVPDTVGYAVPRVTEAFFRELIAKTPGGDKVIWSAHCHNDLGMAVANSLAAVLGGARQVECTINGLGERAGNAALEEIVMAVRTRKDIFAVDTRVDATQIVPSSKLVSTITGYPVQPNKAIVGANAFAHESGIHQDGVLKHRETYEIMSAESVGWSTNRLTLGKLSGRNAFKTKLAELGIVLSSEEALNAAFARFKELADKKREIFDEDLQALVSDEMVAIDQEEFKFVSLKVNTETGELPRAEIVFNERGAEQRAVSSGSGPVDAVFKAIESVAKSDSELELYSVNAVTKGTESLGEVTVRLARDGRIVNGQGADTDVIVASAKAYLSALNKLASKLERVNPQGEV

SEQ ID NO: 491 - protein, 397 aa, Opitutaceae bacterium TAV2
MQHPSPHRLHLIDTTLRDGEQAAGVVFSQADKLAIARALVEARVPELEVGIPAAGAGAIDDINAVADAVAGRARIITWCRALPGDIALARACRVTGVHLSFPVSNIHMRIWGATPATVLASLDELTAAAREHFDQVTVGAQDASRADPGFLAEFAAAAARTPAVRLRLADTVGFLTPDKTAGLTSHLRHAAPALPVEIHAHNDLGLATANTLAAFSAGASAASLTVNGLGERAGNAALEEVVMALKVAQGIDCGIDTSRFVELSALVARASRRPVPVQKPVVGAGAFLHESGIHCAGLLRDRRSYEPFDPADVGHAASDFVLGAHTGGAAVAAALATCGVTLAKTEARHLAEEVRSRAQASGVPLTAAEALALLAEWRSNSSSARAQPHLTLNVANR

SEQ ID NO: 492 - protein, 220 aa, Ceratopteris richardii
MGRGKIEMKRIENRTTRQVTFCKRRAGLVKKARELSVLCDADVALIVFSSSGRLFEYAGSRSMREIIQAYVDAHEDSSSLLQLRSEEACVSQDLRAELTELRKEVESLRQEKRRKDGDIHDLKLLSADELDSLEGEVETSLCSIRKRQKQLYREKMNETFRKEEELRKENEKLRKQVEELQCARWEICCAQGFEASATSMCTSHGMTSERSDSFLDLRLN

SEQ ID NO: 493 - protein, 241 aa, Chimonanthus praecox
MGRGRVELKRIENKINRQVTFSKRRNGLLKKAYELSVLCDAEVALIIFSSRGKLYEFGSVGTIKTLERYQRCCYNPQDANTSDRETQAWYQEVSKLKVKYESLQRSQRHLLGEDLGPLSVRELQNLEKQLEVALSQARQRKTQIMMEQMEELRRKERQLGDINKQLRNKLEAGQGALRSIQGQWESGAIVGNNTFSLHPSHSSHIECEPTLQIGYPQFVPPEATIPRSAPGENNFMRGWVL

SEQ ID NO: 494 - protein, 477 aa, Vitis vinifera
MISFSMMEWNAKAPVQWDWENLDIFNAKSTEIPKKLQSDWEIEGEGGIDTGSFYSSGCGAGSGGSGSDLGHAYSSKSSKSASIDSSSKVGIKTSNFTFEAFQDFSQDFNKKRDLERAEPTGSSPNLEASIGSGEPLIGLKLGKRTYFEDVSAGANAKGSVFSVIPISSDTTAKRSRLSCQNAHVSRCQVEGCNLDLSTAKDYHRKHRVCESHTKCPKVIVGGLERRFCQQCSRFHSLSEFDEKKRSCRRRLSDHNARRRKPQPEGIQSNSARLSSFYGGKQQMSLVLSSVPIVHTRPAVNPSWEGTCSKFTQTKGLVRPGNTGGIDRQLHLPGSELQNGISTLCHDSSRLLHSKGAIAEVLNQGLGDSMISSNLDTSQDLRRALSLLSTNSWGSCETQPIPSDHPMHVNQTSMPQSIMHAVSQGMLHSTSEHWRTELPSTDSRVHILPSQGDGNTHFQEFKLFKAPYESGFSSGQLN

SEQ ID NO: 495 - protein, 615 aa, Vitis vinifera
MASILLNPTFSTTTAATTTSKLNHPSFSTTPISCSKGILKAPIPSTLFFKPPSHSLATKVLSHRLPVRSALRPEYIPNRIDDPNYVRIFDTTLRDGEQSPGATMTSKEKLDIARQLAKLGVDIIEAGFPAASKDDLDAVKIIAKEVGNAVDENGHVPVICGLARCNRNDISTAWEAVKYAKRPRIHTFIATSEIHMKYKLKKSEKEVIEIAREMVKYARSLGSEREFLYKILGEVIKAGATTLNIPDTVGYTVPNEFGQLIADIKSNTPGIENVIISTHCQNDLGLSTANTIAGACAGARQVEVTINGIGERAGNASLEEVVMALKCRGEKALGGLYTGINIRHIVKTSKMVAEYSGLQVQPHKAIVGANAFAHESGIHQDGMLKHKETYEIISPEDIGLFRSNESGIVLGKLSGRHALKSRLLELGYEIEGMELDDIFWRFKEVAEKKKNLTDVDVIALVSDEIFQPKVFWKLGDLQVTCGTLGLSTATVKLIDADGQKHVACSVGTGPVDSAYKAIDLLVKEQVTLLEYGLNAVTEGIDAIATTRVLIRGEKNHTLTNALTGETVHRSFSGTGAGMDIVVSSVRAYISALNKMLGFKDQSKPKVSADRSQDSV

SEQ ID NO: 496 - protein, 465 aa, Vitis vinifera
MEWNLRTPSEWDWETLTAFNTKAFEFPGRVQLSNHDIEVDGGVDNGSVYSSGGGGFSGSDLGHGSSSRSSISVSGDSSLKEGIKKFRNVEDFHKDFSENKELIRVGSSGNCPTVGTSDGSGEAMIGLKLGKRTYFEDVCAASTAKTTTSSVNPASSVSATKRFRTSYQSSQTPRCQVEGCNLDLKSAKDYHRRHRICENHSKSPKVIVAGLERRFCQQCSRFHELTEFDDKKRSCRRRLNDHNARRRRPHPESIQFSSGRLPSSLYDGRQQINLACNRLPIPVATPMWQNPCSFKDTQTGGSLIRPVKAVGIDKQLHLPTDEMPDAISMLHGNSERMLSFDGSTPRVLNQGLEASAIASNSNVAPDFRRALSLLSTNSWGLNDPGPTSLDQLMHVNQTSMAQPTMHAEPHNWALASSENMHVQQTPSETRGHSLDLHNNGSSMFQEFQLFKAPYESGCFYPNQIN

SEQ ID NO: 497 - protein, 358 aa, Vitis vinifera
MEGGGGGGGGGLLFNWLRKDLGNSLPIWIIYAQSNTPLVPHVTVTPLLSPLSTTLLRLRSLPANQTLENPNPKMVDKDDDLGLSLALKCPEALPQRPLNLFVQKKALCSDAFHASETRAYLRGIDVNRAPTMADCEDVGVSSPNSTISSISGKRNDRETNEEENENENEIESSEEDAGGTGDTVRKKLRLSKEQSAILEETFKEHNTLNPKQKLALAKQLNLRPRQVEVWFQNRRARTKLKQTEVDCEYLKRCCENLTEENRRLQKEVQELRTLKLSPQLYMHMNPPTTLTMCPSCERVAVASASSSAPSPSPASNPLAAAPHFPLGPHQHRPMPIAGPWAGAASMRHRPFDAHGTRS

SEQ ID NO: 498 - protein, 304 aa, Vitis vinifera
MLDYEWGNPSPIMLSGDEPPQDSDQTRQIFDHYHQTFTDGLVAPATAFFHHQSQPQPAHIHSLYDPRAYHTYQAPPPAMLSLEPVAGTSAGGGTGFMVVPKSEEMVPAADFTARIGLNLGGRTYFSSEDDFVNRLYQRRSRPAEPGLTNSPRCQAEGCNADLTHAKHYHRRHKVCEFHSKASTVFAAGLTQRFCQQCSRFHLLSEFDNGKRSCRKRLADHNRRRRKSQQPIQDNHKLHQHHLENARNSSSDNITRSPPDSGAHSSSSVTVAVSPPRMTLDCFRQRPYQTTASSASSSSLFFPSG

SEQ ID NO: 499 - protein, 297 aa, Vitis vinifera
MMVDKEDLGLSLSLSFPQDAHRPLQLNLMPSLLPASSSSPSPSPFALQKPSWHDAFPSSDRTSETCRGDARSFLRGIDVNRLPSTADCEEEAGVSSPNSTISSVSGKRSEREANGDEHEMERACSRGISDEEDGDTSRKKLRLSKDQSAILEENFKEHNTLNPKQKLALAKQLNLRPRQVEVWFQNRRARTKLKQTEVDCEFLKRCCENLTEENRRLQKEVNELRALKLSPQFYMQMTPPTTLTMCPSCERVAVPPPSSEARSHQMATTHHRPIPINPWATATPIPHRPFDALHPRS

SEQ ID NO: 500 - protein, 516 aa, Sulfurihydrogenibium azorense Az-Fu1
MEKLIIFDTTLRDGEQAPGFSMTVEEKVKMALQLEKLGVDVIEAGFAAASEGDFEAVKRVAEEVKNAIVCSLARALQSDIDKAGEALLAAENRRIHTFIATSPIHMQYKLKMTPDEVVERAVAAVKYALKYTDDVEFSAEDAFRSEREFLYRVFEAVIKAGAKTINVPDTVGYAIPEEFGQLIKDIKNNVPNIDKAVISVHCHNDLGLAVANSLAAVKNGARQVHATVNGIGERAGNAAVEEVVMAIKVRHDYFKGIYTTINTKEIYKTSRLLCRITGSFVQPNKAIVGDNAFAHEAGIHQHGILAHRETYEIMRAEDVGVPKSKIVLGKHSGRHAFKTRLQELGYTNLSDAEIDSLFLKFKKLADKKKEVFDEDIEALILEEFSFFENEVKVSYFHVVSGDNVIPSATVKIEKDGEEIISTASGDGPIDSVINAVEKAIGIKGKLLDYTIRSLSSGKDAMGEVRVLVKFDDTDYVASGKGTSTDIIEASLKAYVDAYNKYTARKAFLEKRISEGV

SEQ ID NO: 501 - protein, 514 aa, Persephonella marina EX-H1
MNRLIIFDTTLRDGEQAPGFSMTVEEKVTMAKQLEKLGVDVIEAGFAAASEGDFQAVNAIAETIKDSTVCSLARSLHSDIEKAGEALAPAERKRIHTFIATSPIHMQYKLKMTPEQVLERAVDAVKFARNFTDDVEFSAEDAFRSERDFLFKVFEAVIDAGAKTINVPDTVGYAMPEEFGQLIEDIINNVPNIDKAVISVHCHNDLGLAVANSLSAIKKGARQAHVTINGIGERAGNAALEEVVMSIKVRHDYFKDVYTEINTKEIYKTSRLLCRITGSFVQPNKAIVGDNAFAHEAGIHQHGVLAHRETYEIMRAEDVGVPASKIVLGKHSGRHAFKTRLEELGYRNLSEEEVDKLFRKFKALADKKKEVFDEDIEALIFDELFRTYEEVKLVYFHVLSGNSAIPSSTVKIEKDGKEITATACGDGPIDSALKAIEKALGMTGRLKDYSIRSLSAGKDAMGEVRTVVDFEGTTVSGKGTSTDIIEASVKAYLDAYNRYIARKTFIEKRISEGV

SEQ ID NO: 502 - protein, 397 aa, Acidobacterium capsulatum ATCC 51196
MTQDRLYFFDTTLRDGEQAPGCSMTAAEKLQMARTLENLGVDILEAGFAAASDGDFEAIRTIASEVRGPSVASLSRSRKEDIVRAAQAVETGSKPRIHIFLASSDIHLEYKLKISRAEALEQAGSSVRLARQYVDYVEFSPEDSTRTDLDFLCEMVKVAIEAGATTINLPDTVGYAVPNEYGAMFRTVLAKVPGADKVILSAHTHDDLGLATANALAAIEAGARQVECTINGIGERAGNAALEEIAAALHVRKDKYPVEHGIQLEKLYPASQQLGQTISFGPSPNKAIVGANAFAHEAGIHQHGVLSNPLTYEIITPSAVGVPSNRMVLGKHSGRAALKARLKDLGYVLGPEDIEETYHAFTALADRKKAVYDQDLINLVAHHQRHADLVPEVPANS

SEQ ID NO: 503 - protein, 444 aa, Gibberella fujikuroi
EPGLRDGYLLRIEFESKSNRAELGSHRFQTSISIVAKSGLFPTMSISSNTATNPYSSINDLLSNVRNFKIIESTLREGEQFANAYFSTETKIKIAKMLDAFGVDYLELTNPAASPQSRDDCEAICKLGLKAKILTHTRCTLEDAKLACDCGVDGVDVVIGTSQFLREHSLGGKNMTAITKQAIEVIEYIKSRGCEVRFSSEDSFRSDLVDLLSIYRAVNNVGVNRVGVADTVGLASPRQVYDLVRTLRGCVSTDIEVHFHDDTGCAVANAFTALEAGATHVDTSVLGLGERNGITPLGALMARMMPTSRDYILSKYKLQELKKIEDFVAECVEVNVPFNNPVTGFCAFTHKAGIHAKAILNDPSTYEILKPEDFGLSRYVHFTSRLTGWNAIKSRVDQLGLKMTDAQVKECTAKLKSMADLKVMTLDESDALIRSFHLELQNGA

SEQ ID NO: 504 - protein, 212 aa, Ranunculus sceleratus
TTNRQVTFCKRRNGLLKKAYELSVLCDAEVALIVFSNRGRLYEYANNSVKKTIDRYKKTCSDASTALTVSEANSLFYQQESSKMKQQIDILQNSNRHLMGEALSCLSIKELKQLESRLEKGISRIRSKKNEMLMAEIEYMQKREVDLHNDNVYLRQKISENERAQQHMNSLPGNAYEAMTSAPYDSRNFLQVNLADTKDHHYGSGSTALQLC

SEQ ID NO: 505 - protein, 479 aa, Zea mays
MGSFGMDWNQKASVLWDWENLPPVAVGASGSENPRMAAAPQALHSACGTISSSSEMGYGSSKSSVSASADDSSPKAKGKSMELNFAPDKVPDKNTDSGKVDDARTSPSSPVIAISSAEPVLSLKLGKRTYFEDVCGGQSVKSLPSDTSAVTPPPASPKKTKVTPNKKSYCQVEGCKVDLSSAKEYHRKHRVCEPHSKAPKVVVAGLERRFCQQCSRFHGLAEFDQKKKSCRRRLNDHNARRRKPQPEALSFGSSRLSAMFYDTRQHTSLLFGQGPYGQMRSCASSSWDNPGGGFKFAETKGPWLRAGGVDGLHQPSQQVWNNFMPHGVHQDFDGFTAFKGTNAKVLHQGVEASAVASNQNGAPQPDLHRALSLLSNSWAGGGTGTGTDQHPTAQLRHAALSSSLAASSVSVAQASPAGLWQDGGAALGHHDYAHAFQAINTPGGGGAAAPIAVGQELLQLPRPPSLYDDGSSSRYDLMR

SEQ ID NO: 506 - protein, 624 aa, Zea mays
MASSLLSSPAKPTITTTTKTTPAPRPARSAHVHVLSAARCLRLRLRASSQHPPPPPTPRSRRPEYVPNRIDDPNYVRIFDTTLRDGEQSPGATMTSAQKLVVARQLARLGVDIIEAGFPASSPDDLDAVRSIAIEVGNPAPAGEDAAVHVPVICGLSRCNRRDIDAAWEAVRHARRPRIHTFIATSDIHMQHKLRKTPDQVVAIAREMVAYARSLGCTDVEFSPEDAGRSNREFLYHILGEVIKAGATTLNIPDTVGYNLPYEFGKLIADIKANTPGIEKAIISTHCQNDLGLATANTLAGARAGARQLEVTINGIGERAGNASLEEVVMAIKCRRELLDGLYTGIDSRHITLTSKMVQEHSGLHVQPHKAIVGANAFAHESGIHQDGMLKYKGTYEIISPDDIGLTRANEFGIVLGKLSGRHAVRSKLVELGYEIGDKEFEDFFKRYKEVAEKKKRVTDEDLEALLSDEIFQPKVIWSLADVQATCGTLALSTATVKLIAPDGEEKIACSVGTGPVDAAYKAVDKIIQIPTVLREYSMTSVTEGIDAIATTRVVVTGDVSNNAKHALTGQSFNRSFSGSGASMDIVVSSVRAYLSALNKICSFAGAVKASSDVAETASVPSTE

SEQ ID NO: 507 - protein, 515 aa, Oceanobacillus iheyensis HTE831
MSRIKIFDTTLRDGEQSPGVNLNKAEKLEIAKQLEKYGVDRMEAGFPASSKGDFESVKQIAETIKSSSVIALARAVKSDIDIAYEALKGAEKPAIHIFLATSPIHMTYKLKKSPEQVIETAVNMVTYAKERFDEIEWSAEDATRSDWNFLAQIIEKVIEAGATVINLPDTVGYTTPEEYGKLFRFIKETVPNINQVALSCHCHNDLGMAVANSIAAVENGATQVEGTINGIGERAGNAALEEVAVALKIRSDYYPFETGLILKETKRTSDLVAKLTGMYVQANKAVIGRNAFSHESGIHQDGVLKNTETYEIITPEMVGVSSNTLFLGKHSGRHAFKDKLKEFGVELSEEELKTAFEQFKLLTDQKKEVTDDDLYTILMDIKTDSTVVDKYKLIQFGVSYDTAATPKANVILESPNGSLIEATQQGNGSVEALYKTINYLIAENITLVDYQINSVGGGKDALAESHVQIIINGETINGRGSAQDVLQASAVAFIQAVNRYYVQKKANLTRLVYES

SEQ ID NO: 508 - protein, 259 aa, Brassica oleracea var. botrytis
MGRGRVEMKRIENKINRQVTFSKRRNGLLKKAYELSVLCDAEVALIVFSSRGKLYEFGSVGVERTIERYHRCYNCSVTNNRPEESKQNWCQEVAKLKAKYESLVRTNRHLLGEDIGEMGVKQLQALERQLEAALTATRQRKTQVMMEEMEDLRKKERQLGDINKQLKIKFEAGGHAFKSFQDFWPNSAASMAGDPNNSKFPVQPSHPDSVDCNTEPFLQIGLVLVYIRFQQHYYVQGEGSSVPKSNVACETNFVQDWFL

SEQ ID NO: 509 - protein, 252 aa, Brassica oleracea var. botrytis
MGRGRVEMKRIENKINRQVTFSKRRNGLLKKAYELSVLCDAEVALIVFSSRGKLYEFGSVGVERTIERYHRCYNCSVTNNRPEESKQNWCQEVAKLKAKYESLVRTNRHLLGEDIGEMGVKQLQALERQLEAALTATRQRKTQVMMEEMEDLRKKERQLGDINKQLKIKFEAGGHAFKSFQDFWPNSAASMAGDPNNSKFPVQPSHPDSVDCNTEPFLQIGFQQHYYVQGEGSSVPKSNVACETNFVQDWFL

SEQ ID NO: 510 - protein, 511 aa, Thauera sp. MZ1T
MKDKLIIFDTTLRDGEQSPGASMTRDEKLRIARQLERMRVDVIEAGFAAASNGDFEAVRSIAEAIKESTVCSLARANEHDIRRAGEAIRPAARGRIHTFIATSPIHMEKKLRMTPDQVVEQAVKAIGWAREYTDDVEFSAEDAGRSEIDFLVRIFEAVIDAGAKTINVPDTVGYNVPEQFAATVRTLIERVPNSDKVVWSVHCHNDLGLAVANSLAAVRTGARQVECTINGLGERAGNASLEEIVMAVRTRADIFPVETGVDTTQIVPASKLVSQVTGYPVQPNKAIVGANAFAHESGIHQDGVLKHRETYEIMRAEDVGWGANKLVLGKLSGRNAFRARLQELGIEIESEEHLNQAFARFKELADRKSEIFDEDLTALMRDEAVTPAPEQYRLVSTRFHSETGETPVAEITLSIGGAEKHARANGSGPVDAAFKAIETVATTGSELLLYSVNAITSGTDAQGEVTVRLSRDGRVMDGQGADTDIIVASAKAYLNALNKLHVGAERLNPQV

SEQ ID NO: 511 - protein, 422 aa, Brassica rapa subsp. pekinensis
RTASTMVVQSVLHFASSFPSLGLNRPYKRPSLSTSCCSSLSNKAGTGATDFKPIVERWPEYIPNKLPDKNYVRVLDTTLRDGEQSPGAALTPPQKLEIARQLAKLRVDIMEVGFPASSEEEFETIKTIAKTVGNEVDEETGYVPVICGLARCNHRDIEAVWEAVKYAKRQTIIIFISTSDIHMKFKLKKTKEEVIQMAVSSVSYAKSLGFNDIIFGCEDACRSEKEFLCKILGEAIKVGATTVNIGDTVGINMPQENWELVSYLQAHTPGIDDVVLSVHCHNDLGVATANAIAGICAGARQVDVTVNGIGERSGNAALEEVVMALKCRGSYVMDGVYTRIDTRQIMATSNMVQEYTGLRVQAHKPIVGANCFVHESDLHQDVILKSRRTYEILSPEDVGVVKTENSGIARGKLSGRHAVKDV

SEQ ID NO: 512 - protein, 158 aa, Brassica rapa subsp. pekinensis
VDEETRYVPVICVISRCKHKDIEAAWEALKYAKKPRIYIFICTSEIHMKYKLKKTKEEVIEMAKSSIRFAKKLGFTDIQFGCEDGGRSEKDFLCKIMGEAIKEGVKTVTLADTVGINIPQEFGEMVTYLKANTPGIDDVVVAFLCHNDLGLATANTIA

SEQ ID NO: 513 - protein, 398 aa, Brassica rapa subsp. pekinensis
MIFTTGSTVAVQSVVHFASSFHSPGLTHPYKKPSLFTTCCSSFSKKVGTESSNMCVYIPNKLPDKKYVRVFDTTLRDGEQAPGAALTPPQKLEIARQLAKLRVDIMEVGFPASSEEEFETVETIAKTVGNEMDEETGYLPVICAVARCKQRDIKAVWEAVKYAKRPTILIFISTSDIHMKYKLKKTGEEVIQMAVSSVRFAKSLGFNEIQFGCEDAGRSEKDFLCKILGEAIKAGATTVNLADTVGINMPQEIGELVSYLKANTPGIDDVVFSIHCHNDLGVATANAIAGVCAGARQVDVTVNGIGERSGNAPLEEVVMALKCGGAFTMDGVYTGIDTSQIMATSKMVQEYTGLYVQSHKPIVGANYFAHKSDLNQAGIFKNQGTYSPEDVEVVKSQN

SEQ ID NO: 514 - protein, 169 aa, Brassica rapa subsp. pekinensis
AIKAGATTVAFADTVGINMPREYGELVRYVKANTPGIDDAIFSVHCHNDLGVATANTIAGVCAGARQVEVTINGIGEKSGNAPLEEVVMALKCRGAYLMGGVYTRIDRRQIMATSKMVQEYTGLYVQPHKPIVGANCFLHESGIHQDGILKNQRTYEILSPEDVGVVKS

SEQ ID NO: 515 - protein, 331 aa, Zea mays
MEWTAPKRAASPPSPPLLWDWGGDHAGATGSGSGSSGDAPARRGGREREAKRARADDGEVRCQVEGCGLDLSRVKEYHRKHRVCEAHTKSPRVVVAGQERRFCQQCSRFHALSEFDQKKRSCRRRLSDHNARRRKPQPDAFAFASARLPSSSFDDRRQISFVWNKAPVSHPFTSPWDSSSELPHAKEIREVSTKVGTITGQVHLDKSYVSNAVPSLTHGKDEPWPMKGPDMSIAASKFDGAPDLQRALSLLSVGACGLPDPVHQTSCVIQFTSASENSGDLHLSHGANSGLASCGDGQHIASQPQAQLVRFTMDTSNSVYEPSFFSVNQIN

SEQ ID NO: 516 - protein, 505 aa, Brassica juncea
MASSLLTSSGVIPTTGSNMVVRSFLPFGSVRLTRPYNNSSLLISCCSPVSKNAETSGIDLKPIVERWPEYIPNKVPDKNYVRVFDTTLRDGEQSPGAALTPPQKIEIARQLAKLRVDIMEVGFPVSSEEEFETIKTIAKTVGNEVDEETGYIPVICVIARSKERDIKAAWESVKYAERPRIVVFTSTSDIHLKYKLKTTREEVVEITKSSIRFAKSLGFKDIEFGCEDGGRSDKDYVCKVFEEAIKAGATTVAFPDTVGINMPQEYGELVRYVKANTPGIDDVIFSVHCHNDLGVATANTIAGVCAGARQVEVTINGIGERSGNAPLEEVVMALKCRGAYLMGGVYTRIDTRQIMATSKMVQEYTGLYVQPHKPIVGANCFVHESGIHQDGVLKNRSTYEILSPEDVGVVKSQNSGIVLGKLSGRHAVKGRLKELGYEINDEKLNEVFSRFRDLTKQKKRVTDDDLKALVMCGDAIFSSDKLNGANGKEINSISYVPAPQISSVV

SEQ ID NO: 517 - protein, 503 aa, Brassica juncea
MASSLLTSPTMIPTTGSTLVLRSVLPFRSSSLPSLRLNRPYNKSSLLISCCSPVPEKGETSASGLKPVVERWPEYIPHKLPDKNYVRVFDTTLRDGEQAPGGALTPPQKLEIARQLAKLRVDIMEVGFPASSEEEFETVKTIAKTVGNEVDEETGYVPVICAIARSKLEDVKAAWEAVKYAKRPKILIFTSTSDIHMKYKLKKTKEEVIEMATSSVRFAKSLGFVDVQLGCEDGGRSEKEFLCKILGESIKAGATSVNVADTVGINLPEEYGELVRYLKANTPGIDDIIFSAHCHNDLGLATANTIAGVCAGARQVEVTVNGIGERSGNAPLEEVVMALKCRGEYLMDGVYTRINTRQIMATSQMVQEYTGLYVQPHKPIVGASCFVHESGIHQDGILKNRSTYEILSPEDVGVVKSPSSSIVLGKLSGRHAVNDRLKEMGYELDDEKLNDIFSKFRGLTKHKKRITDDDLKALVTCGDENSLNGAYGKETSYVPISQISSVV

SEQ ID NO: 518 - protein, 505 aa, Brassica juncea
MASSLLTSSGIIPTTGSNMVVRSFLPFGSVRLTRPYNNSSLLISCCSSVSKNAETSGTDLKTIVERWPEYIPNKLPDKNYVRVFDTTLRDGEQSPGAALTPPQKIEIARQLAKLRVDIMEVGFPVSSEEEFETIQTIAKTVGNEVDEETGYIPVICVIARSKERDIKAAWESVKYAKRPRIVIFTSTSDIHLKYKLKMTREEVVDMVASSIRFAKSLGFEDIEFGCEDGGRSDKDYICTVFEEAIKAGATTLACPDTVGINMPHEYGKLVRYIKANTPGIDDVIFSAHCHNDLGVATANTIAGICAGARQVEVTINGIGERSGNAPLEEVVMALKCRGAFVMGGVYTRIDTRQIMATSKMVQEYTGLYVQPHKPIVGANCFVHESGIHQDGILKNRSTYEIISPEDVGVVKSQNSGIVLGKLSGRHAVKGRLKELGYEISDEKLNEVFSRFRDLTKQKKRVTDDDLKALVTCGDEIFSSDKLNGTDDNEINSNGYVPAPQISSVV

SEQ ID NO: 519 - protein, 460 aa, Brassica juncea
MASSLLTCPTMIPTTGFTVVVRSGLPFRSSLPSLRLNPLCNLSISCCSPVSKMGGTSASDLKPVVERWPEYIPHKLPDKNYVRVFDTTLRDGEQAPGGALTPPQKLEIARQLAKLRVDIMEVGFPVSSEEEFETVKTIAKTVGNEVDEATGYVPVICAIARSKPEDIEAAWEAVKYAKRPKILIFTSTSDIHMKYKLKKTKEEVIEMAASSVKFAKSLGFVDVQLGCEDGGRSEKEFLCKILGESIKAGATTVNVADTVGINMPDEYGELVSYLKANTPGIDDVIFSVHCHNDLGVATANTIAGVCAGARQVEVTVNGIGERSGNAPLEEVVMALKCRGEYLMDGVYTRIDTRQIMATSQMVQEYTGLYVQPHKPIVGANCFVHESGIHQDGILKNRSTYEILSPEDVGVVKSQSASIVLGKLSGRHAVKDRLKELGYELDDEKLNDIFSRFRDLTKHKK

SEQ ID NO: 520 - protein, 463 aa, Brassica juncea
  misc_feature (459)..(459): Xaa can be any naturally occurring amino acid
  unsure (1)..(463): unsure at all Xaa locations
MASSLLTCPTMIPTTGFTVVVRSGLPFRSSLPSLRLNRPYNKSSLSISCCSPVSKMGGTSASDLKPVVERWPEYIPHKLPDKNYVRVFDTTLRDGEQAPGGALTPPQKLEIARQLAKLRVDIMEVGFPVSSEEEFETVKTIAKTVGNEVDEATGYVPVICAIARSKPEDIEAAWEAVKYAKRPKILIFTSTSDIHMKYKLKKTKEEVIEMAASSVKFAKSLGFVDVQLGCEDGGRSEKEFLCKILGESIKAGATTVNVADTVGINMPDEYGELVSYLKANTPGIDDVIFSVHCHNDLGVATANTIAGVCAGARQVEVTVNGIGERSGNAPLEEVVMALKCRGEYLMDGVYTRIDTRQIMATSQMVQEYTGLYVQPHKPIVGANCFVHESGIHQDGILKNRSTYEILSPEDVGVVKSQSASIVLGKLSGRHAVKDRLKELGYELDDEKLNDIFSRFRDLXKHKK

SEQ ID NO: 521 - protein, 237 aa, Arabidopsis halleri
KRIENKINRQVTFSKRRNGLLKKAYELSVLCDAEVALIIFSSRGKLYEFGSVGNTRTIERYNRCYNCTLSNNKPEETTQSWCQEVTKLKSKYESLVRTNRNLLGEDLGEMGVKELQALERQLEAALTATRQRKTQVMMEEMEDLRKKERQLGDINKQLKIKFETEGHAFKTFQDLWANSAASVAGDPNNSEFPVENSHPISLDCNTEPFLQIGFQQHYYVQGEGSSVSKSNVAGETN

SEQ ID NO: 522 - protein, 237 aa, Boechera gunnisoniana
KRIENKINRQVTFSKRRNGLLKKAYELSVLCDAEVALIIFSSRGKLYEFGSVGIARTIERYNRCYNCSLGNNKPEETTQSWCQEVTKLKSKYESLVRTNRNLLGEDLGEMGVKELQALERQLEAALTATRQRKTQVMTEEMEDLRKKERQLGDINKQLKIKFETEGHAFKTFQDLWAHSAVSVGGVSNNSEFPVESSHPNSMDCNTEPFLRIGFQQHYYVQGEGSSVTKSNVAGETN

SEQ ID NO: 523 - protein, 237 aa, Boechera stricta
KRIENKINRQVTFSKRRNGLLKKAYELSVLCDAEVALIIFSSRGKLYEFGSVGIARTIERYNRCYNCSLGNNKPEETTQSWCQEVTKLKSKYESLVRTNRNLLGEDLGEMGVKELQALERQLEAALTATRQRKTQVMTEEMEDLRKKERQLGDINKQLKIKFETEGHAFKTFQDLWANSAVSVGGVSNNSEFPVESSHPNSMDCNTEPFLQIGFQQHYYVQGEGSSVTKSNVAGETN

SEQ ID NO: 524 - protein, 523 aa, Shigella flexneri 2a str. 301
MSQQVIIFDTTLRDGEQALQASLSVKEKLQIALALERMGVDVMEVGFPVSSPGDFESVQTIARQVKNSRVCALARCVEKDIDVAAESLKVAEAFRIHTFIATSPMHIATKLRSTLDEVIERAIYMVKRARNYTDDVEFSCEDAGRTPIADLARVVEAAINAGATTINIPDTVGYTMPFEFAGIISGLYERVPNIDKAIISVHTHDDLGLAVGNSLAAVHAGARQVEGAMNGIGERAGNCSLEEVIMAIKVRKDILNVHTAINHQEIWRTSQLVSQICNMPIPANKAIVGSGAFAHSSGIHQDGVLKNRENYEIMTPESIGLNQIQLNLTSRSGRAAVKHRMDEMGYKESEYNLDNLYDAFLKLADKKGQVFDYDLEALAFIGKQQEEPEHFRLDYFSVQSGSNDIATAAVKLACGEEVKAEAANGNGPVDAVYQAINRITDYNVELVKYSLTAKGHGKDALGQVDIVTNYNGRRFHGVGLATDIVESSAKAMVHVLNNIWRAAEVEKELQRKTQHNENNKETV

SEQ ID NO: 525 - protein, 518 aa, Fibrobacter succinogenes subsp. succinogenes S85
MTETRKPFFYDVTLRDGNQALPKPWNNAQKKDVYLLLLKLGVQGAEVGFPASSEMDFESVMELAKLTAQMAEEGDEVAKNVVVSGLARCIESDIQRCWEAVQYAPHPRIHTFLATSPLSMENVLHMTPEQVKEKAVKCVKFAKSLVGDRGDVEFSAEHFGDCLENMDFVIDVLKAVVEAGATTINLPNTVERYRPKLYVDQVKQVYEALPKNITISVHCHNDLGMATAATVESFFVGATQLEVALNGLGERCGNTNFYEVAIGLHNSGVDTGLHLERIYETAILVSHWSGVPIYIRAPLIGTEAIVHRSGIHQDGASKTKDMKKGAYRPIDYSIIGRNQNDTLSFTSQSGRTAVYEIITKFGYKMTLQEASKLQPVLKRLSEAEGELSAERVLDVFREQFVNVNGRLVFNNIEVIPDENRFIFHFKKDGEALVKSVTAEGPIEAALMLMREIGMPVELVKYRQLVVPEKDKLWAGRGLSRIVLKANGEEVEGRGVSSDTLKANMRALFGGVNLIYKKA

SEQ ID NO: 526 - protein, 481 aa, Sorghum bicolor
MGSFGMDWNQKASVLWDWENLPPIGANMSDNPRMTAAPQGEAKFAGLEATRHESVHSSCGTFSSSSEMGYGSSKSSVSASTDSSPKAKGNSMELNFAPAKAPDKNTDSGKVDDARTSPSSVIAISSGEPVLSLKLGKRTYFEDVCGGQSVKSLPSDTSAVTPLASAKKAKSAPNTQKSYCQVEGCKVDLSSAKEYHRKHKVCEPHSKASKVVVAGLERRFCQQCSRFHGLSEFDQKKKSCRRRLNDHNARRRKPQPEAFSFGSSRLSTMFYGNTRQQTNLPFGQGPYGQMRSCANSSWDNPVGGFKFAETKAPWLRAAGVDGLHLSSQQVWNNFMPHGVHQDFDGFTAFKETSAKVLDQGAEASAVVSNPDGAPDLQRALSLLSNSSAGAGTNQQPTAQLHHHHAGLSTLAASSSSVMQASSPGLWQDSSGTALGHHAHARFQALDAPGSGAAIATAQELLQLPRSPSLYDSSSSHYDLMR

SEQ ID NO: 527 - protein, 337 aa, Sorghum bicolor
MEWTAPKPASSPSSPPLLWDWGDHAATGSGSSSGDAPARRGAGKEREAKRARGEDGGGGAEVRCQVEGCGLDLTRVKDYHRKHRVCEAHTKSPRVIVAGQERRFCQQCSRFHALSEFDQKKRSCRRRLSDHNARRRKPQPDAFTFASARLPSSLFDDRRQISFVWNKAPVSHVRPFTSPWDSSSDLKLPHAKETREVSTKVGTITGQVHLDKSHMSNAIPTLSHGKDEPWPMKGPDMSITASKFDGAPDLQRALSLLSVGACGLPDPVHQTSCVIQFTGASENSGDLHLSHGGNSGPASCADGQHIAAQSQSQLVRFTMDTSNNVYEPSFFGVNQIN

SEQ ID NO: 528 - protein, 418 aa, Sorghum bicolor
MEGNGGAGGGSGSAAPPWDLAMHWAPSAGSSYPQQPLALRPGGVPSSQLQLLHQQQQQQQQELTCLKLGKRPACCWAGAALGSQVVAAQAGAGLPHHLHGNGGGAAAGCGGGASGKAAEGKRKEKQAAAAAPGAAAVPRCQVEGCHVALADAKDYHRRHKVCEAHSKAPRVVVLGAEQRFCQQCSRFHAISEFDEAKRSCRRRLAGHNERRRKSNASEAMARGAAHPHGVTAFGHGFLPPCGGLSGSSAGALSLLSSARSGATSAAPWQVTTSDISARSSAALDDLIAENRAALLAWQYFSDRSSSAPGRHFASSSSTATGCALPPADDQHAAASWRPHPHSGVGGGRHHMAPPGVWHTTLDLMQTASSAAPATSTGAPFRPVPERAGARPRGKSKDGDDASGCSLDAWAPAGGARVL

SEQ ID NO: 529 - protein, 400 aa, Sorghum bicolor
MMNLSAAANAACDEFPYVPSNAGAAPPSLLPIMDQENSIQREHHHQLGYNLEANSLALLPPSNAAAAHHHHHHATTIAGHSPHDILQFYPASASHYLASGGGGGNPYSHFGSAGTGSTFHQSSYYPPAAPEYYFPTLVSSAEENMASFAATQLGLNLNYRTYFPPRGGYTYGHHPPRCQAEGCKADLSSAKRYHRRHKVCEHHSKAPVVVTAGGLHQRFCQQCSRFHLLDEFDDAKKSCRKRLADHNRRRRKSKPSDADAGDKKRAHGNKAAAAKDKAGSSSKNMDIGDGLGTQILGSALLSKEQDQAMDLGEVVKEAVDPKGKASMQQHHGIHQQHHGFPFHSSSAGSCFPQTQAVSSDTTSNIAQVQEPSLGFHHQHHHQHSNILQLGQAMFDLDFDH

SEQ ID NO: 530 - protein, 233 aa, Sorghum bicolor
MMERVEDLGLSLSLSSSLASPRTHHVATMLLRAPPEKRFLEMPLLLPAKRSELATGEEGLRGGGSDEEDGGCGIDGSRKKLRLSKDQSAVLEDSFREHPTLNPRQKAALAQQLGLRPRQVEVWFQNRRARTKLKQTEVDCEYLKRCCETLTEENRRLHKEVQELRALKLVSPHLYMHMPPPTTLTMCPSCERVSSSNASNANSAAADRKAGAGVADGGAIVCHRPIAVRPQQS

SEQ ID NO: 531 - protein, 633 aa, Sorghum bicolor
MASSLLSSPAKPFCSTTKTTPAPKATRFPSPRFLSSAHVLSAARRLRAVSARASQQQPPPPRGQQQRRPEYVPNRIDDPNYVRIFDTTLRDGEQSPGATMTSAQKLVVARQLARLGVDIIEAGFPASSPDDLDAVRSIAIEVGNPAPAGDDGGADATHVPVICGLSRCNRKDIDAAWEAVRHARRPRIHTFIATSDIHMQHKLRKTPEQVAAIARDMVAYARSLGCTDVEFSPEDAGRSNREFLYHILGEVIKAGATTLNIPDTVGYNLPYEFGKLIADIKANTPGIENAIISTHCQNDLGLATANTLAGARAGARQLEVTINGIGERAGNASLEEVVMAIKCRRELLNGLYTGIDSRHITLTSKMVQEHSGLIVQPHKAIVGANAFAHESGIHQDGMLKNKGTYEIISPDDIGLTRANEFGIVLGKLSGRHAVRSKLVELGYEIGDKEFEDFFKRYKEVAEKKKRVTDEDLEALLSDEIFQPKLIWSLADVQATCGTLSLSTATVKLIGPDGEERIACSVGTGPVDAAYKAVDQIIQIPTVLREYSMTSVTEGIDAIATTRVVVTGDVSINAKHALTGRSFNRSFSGSGASMDIVVSSVRAYLSALNKICSFAGAVKASSEVPEIASVPSTE

SEQ ID NO: 532 - protein, 440 aa, Sorghum bicolor
MGSFGMNWNQKNSMVWDWEHLVPSVSNAVTRHGSANSSGGTLTSSSELGHGSSKSSISASIDSPSGVGNSLEFNFAAVQRHVKNTGTNGRVDDSGNSPSSMIAFSQGEPLISLKLGKRAYFENVCGGQEAKVSAPSDVTSAVTVVKKTKVSQQNAKNWYCQVEGCKVDLSSAKDYNRKHKVCVAHSKAPKVVVAGLERRFCQQCSRFHGLAEFDQNKRSCRRRLTHHNARRRKPQADAISFNSSRLSSMFYDTSHRTNLFFSQPLYGQVRSNAVSPWDNSGGFKFMETKHLSVQPTKTVGLDELHFSTPQISTSVVAHTGHHHNFDRFMPFKGTNTKVLNQVSGVEASATASNSNNGAPEPGRALSLLSDGSWGSNSAVIQQPPSHADAGALPPLATVAVSNTAARHPLDPSLGRFWQDDHPPLDGPAPQIQELAHLRTW

SEQ ID NO: 533 - protein, 428 aa, Leptospira interrogans serovar Lai str. 56601
MKQDSQSENESIVCDLSVSEDQRNVKFFSDLQTPIPKHLPFFMDVTLRDGNQALRRPWNLEQKETIFKQLLKLGVQGIEVGFASSNNQEFEACKYLSSIAPDNVVISSLSRAVEKEIEVSWKAIRFAPKPRIHIVYPVSAFTIQNVLKISPEKVLDRISQSVAYAKSLVGSKGEVQFSGEHFGDSLENLDFAAEAFQIALNNGADVVNLPNTVERYRPWLFVSMVKAVANLLPEDTRISIHTHNDLGMATATTVESYFAGAVQLETALNGLGERAGNTNTYEVAIALHNCGVEVPLNFSTIYETSRLVSYLSEIPIYEKAPLIGEDVISHRSGIHQDGVAKTRHLQKGAYRAFDAALIGRPEGDRIEFTNQSGKSAVYCILKDAGENITLEEAGRLQPILKKISEDLGRRELTLEEIRIEWNRLLRAI

SEQ ID NO: 534 - protein, 528 aa, Leptospira interrogans serovar Lai str. 56601
MSVRLIDCLKNKTQKTGSRIFCEKDMAMDLKDYVRIFDTTLRDGEQCPGAAMTENEKLEIASQLATMKVDIIEAGFPVSSPVQFQAVERIARETEGPMIAALARAMKADIEAASKALQPAKKRRIHTFIASSPIHMKYKLGKEPKEVLKMAVEAVTLCRQFVDDVEFSPEDATRSEPEFLRELCEAVIAAGATTINIPDTVGYTTPAEYGGLFKFLLSNVRGAEKIIFSAHCHNDLGLATANSLAAVQNGARQIECTINGIGERAGNTAMEEVVMAMRTRKDTFGIQTQIKTEEIARASYLVKTITGMLVQPNKAIVGANAFAHESGIHQDGVIKHRETYEIMKPETVGLSSNRMVLGRHSGRAGFKDRIVKLGFSPQVEELEAAYQRFLEIADRKKEIYDEDIRALFSEEARKSTGDRFQLEGFTVSTGTKSTPTAGVRILIDGHVREESATGDGPVDAIYKAIQKTTGMDPEVSRLVISPVTEGQDAMAEASVTLEYKGDRVVGKGSSTDIIEACSRAYISALNRL

SEQ ID NO: 535 - protein, 516 aa, Leptospira interrogans serovar Lai str. 56601
MTKVETRLEILDVTLRDGEQTRGVSFSTSEKLNIAKFLLQKLNVDRVEIASARVSKGELETVQKIMEWAATEQLTERIEILGFVDGNKTVDWIKDSGAKVLNLLTKGSLHHLEKQLGKTPKEFFTDVSFVIEYAIKSGLKINVYLEDWSNGFRNSPDYVKSLVEHLSKEHIERIFLPDTLGVLSPEETFQGVDSLIQKYPDIHFEFHGHNDYDLSVANSLQAIRAGVKGLHASINGLGERAGNTPLEALVTTIHDKSNSKTNINEIAITEASRLVEVFSGKRISANRPIVGEDVFTQTAGVHADGDKKGNLYANPILPERFGRKRSYALGKLAGKASISENVKQLGMVLSEVVLQKVLERVIELGDQNKLVTPEDLPFIIADVSGRTGEKVLTIKSCNIHSGIGIRPHAQIELEYQGKIHKEISEGDGGYDAFMNALTKITNRLGISIPKLIDYEVRIPPGGKTDALVETRITWNKSLDLEEDQTFKTMGVHPDQTVAAVHATEKMLNQILQPWQI

SEQ ID NO: 536 - protein, 522 aa, Shewanella oneidensis MR-1
MSNRVIIFDTTLRDGEQALAASLSVKEKLQIAMALERLGVDVMEVGFPVSSPGDFESVQTIARTIKNSRVCALSRALEKDIDAAAQALSVAEQFRIHTFISTSTIHVESKLKRSFEQVLEMAVGAVKYARRFTDDVEFSCEDAGRTPIDNLCRMVEAAIHAGARTINIPDTVGYTVPSEFGSIIQTLFNRVPNIDQAIISVHCHDDLGLSVANSITAVQHGARQIECTMNGIGERAGNCSLEEIAMILATRKNLLGFETGINAKEIHRTSNLVSQLCNMPIQSNKAIVGANAFTHSSGIHQDGMLKAQNTYEIMTPESIGLNRNNLNMTSRSGRHVIKHRMEEMGYSSQDYNLDALYEQFLHLADKKGQVFDYDLEALAFIEAQAAEDNFYQLRQLVVQSDSTEGVATATVRIEVGGEIKTEAATGNGPVDAAYNAIARATDRRIDIISYKLGAKGVGQDALGQVDITAVYHEQNFHGVGLATDVVEASARALVHVMNLTCRADKVADYKQNMHKNRELGGV

SEQ ID NO: 537 - protein, 521 aa, Streptococcus mutans UA159
MRKVEFLDTTLRDGEQTPGVNFSIKEKVAIAKQLEKWGISDIEAGFPAASPDSFEAVKQIAAAMTTTAVSGLARSVKSDIDACYEALKDAKFPQCHVFIATSPIHREFKLKKSKEEILEVIKEHVTYARSKFDVIEFSPEDATRTELDFLLQVVQTAVDAGATYINIPDTVGFTTPVEFGHIFKYLIENVKSDRDIIFSPHCHDDLGMATANTLAAIKNGAGRVEGTVNGIGERAGNVALEEVAVALNIREDYYDATSAIVLDETVTTSEMVSRFSGIPIPKNKAVVGGNAFSHESGIHQDGFLKNPLTYEIITPELVGVKKSSLPLGKLSGRHAFIEKLKELKLDFEEGEVAPLFAKFKSLADKKHDITDADIRALVAGTSVENPEGFHFKDLRLTSNDDDTITAQVIMVNEGEEEVTIIANGKGSVEAIFNAVDKFFNQTVKLDSYNIEAVTDGIDAQARVLVSVENIDTDTIFNASGLDFDVLKASAIAYINANTFVQKENAGEIGHKVSERDYPSND

SEQ ID NO: 538 - protein, 161 aa, Brassica juncea
  misc_feature (6)..(6): Xaa can be any naturally occurring amino acid
  unsure (1)..(161): unsure at all Xaa locations
DYIPNXISDPNYVRVFDTTLRDGEQSPGATLTSKEKLDIARQLAKLGVDIIEAGFPAASKDDFEAVKTIAETVGNAVDENGYVPVICGLSRCNERDIQRAWEAVRYAKRPRIHTFIATSDIHLEYKLKKSKQQVIEIARSMVKIARSLGCEDVEFSPEDAG

SEQ ID NO: 539 - protein, 161 aa, Brassica juncea
DYIPNRISDPNYVRVFDTTLRDGEQSPGATLTSKEKLDIARQLAKLGVDVIEAGFPAASKDDFEAVKTIAETVGNAVDGDGYVPVICGLSRCNKRDIETAWEAVKYAKRPRIHTFIATSDIHLEYKLKKSKDEVIEIARNMAKFARSLGCEDVEFSPEDAG

SEQ ID NO: 540 - protein, 161 aa, Brassica juncea
  misc_feature (6)..(6): Xaa can be any naturally occurring amino acid
  unsure (1)..(161): unsure at all Xaa locations
DYIPNXISDPNYVRVFDTTLRDGEQSPGATLTSKEKLDIARQLAKLGVDVIEAGFPAASKDDFEAVKTIAETVGNAVDGDGYVPVICGLSRCNKRDIETAWEAVKYAKRPRIHTFIATSDIHLEYKLKKSKDEVIEIARNMVKFARSLGCEDVEFSPEDAG

SEQ ID NO: 541 - protein, 533 aa, Microcystis aeruginosa
MNTSPDRVIIFDTTLRDGEQSPGAALNVDEKLTIARALARLGVDVIEAGFPHASPGDFEAVQKIAGSVGSEADSPIICGLARATQKDIKSAADALRPAAKPRIHTFLATSDIHLQYKLKKTRQEVLEIVPEMVAYAKSFLNDVEFSPEDAGRSDPEFLYQVLERAIAAGATTVNIPDTVGYTTPSEFGALIRGIKENVPNIDQAIISVHGHDDLGLAVANFLEAVKNGARQLECTINGIGERAGNASLEELVMALHVRRSYFNPFLGRPAESTEPLTKINTKEIYRTSRLVSNLTGMIVQPNKAIVGANAFAHESGIHQDGVLKHKLTYEIMDAESIGLTNNQIVLGKLSGRNAFRSRLQELGFELSETELNNAFIQFKEMADRKKEITDRDLEAIVNDEIDTVPDHFRLELVQVSCGNNARPTATVTIRTPDGSELSDAAIGTGPVDALCKAIDRVVQIPNELISFSVREVTEGIDALGEVTIRLRYAGRTYSARAADTDIIVASARAYVSALNRLHVALQQKEKTPEMLQV

SEQ ID NO: 542 - protein, 331 aa, Thermus thermophilus
RDEVVRGRDVVISTHTHDDLGMATANALAGVENGAGQIECTINGIGERAGNCALEEVVMALYVRRDWYKAYTRINTREIYRVSRLVERYTGMPVPPNKAIVGDNAFAHESGIHQDGVIKHRATYEIMDAELIGRRPAVLVLGKHSGRAAFKKALEDLGYKDLSEEEVKKLFARFKEIAEKKGPLSAEELQALVESEREPTSHFFQLEHVQFFSGSGLLPTATVKVKTPDGERLATHTGDGPVDAVYKAIQEAIGLRPELELYRVEAITGSTEALGQVTVRLRLGELQAVGVGVSPDIIEASALAFLDAAGKLASGRATRHPPSIEEVHRGV

SEQ ID NO: 543 - protein, 400 aa, Pantoea agglomerans
MAASESERTGGGNRPMAVIINDTTLRDGEQSPGVAFRASEKLEIAQALVNAGVRELEAGTPALGEEECVRLAILRRQLPDTVMMSWCRMNSAEIHDSARVGMDWVDISVPASDLLREQKLHRPWPAVIASLKPLVQLAHRLGMRVCMGCEDASRSADETLHMLAEVAADLGIERMRFADTLGILDPFSTFTRISALRQHWHGGLEIHAHNDLGMATANTLAAVRAGATHVNTTVLGLGERAGNAALESVTLSLDRCLHLDCGIDFTELPALCRLVAAAAGRTIDVQHPLVGGQVFTHESGLHVAALLRDPRSYQGIDPSLVGREFNLVLGKHSGRQAVSGICARLGYILSETQTLLMLQEVKRFAEHFKRNPGEDEVIAMCQMRMDDQIPFEGQLQAQGG

SEQ ID NO: 544 - protein, 351 aa, Frankia alni
MMTVRDPRFPSSSTTAIQSDAAIKFCDTTLRDGEQAPGVAFTAAEKLAIAAALDAIGVHQIEAGIPAMGVTERDVLREILATDPHADIVGWCRADHRDVEAAASCGLVTAHLTIPVSDLHLKSKLGRDRAWARLRVRDCVADATDRGMRVSVGFEDASRADDAFVTDLAGELRELGVTRLRWADTVGLLDPVSAHDRLGRLVRAVPGPWEIHAHDDFGLATANTIAAVQAGFTWVSTTVLGLGERAGNAPIEEVAMALRHLLKLPVDLDTTSFRSLARLVSRAARRPLPAGKAVVGESVFAHESGIHVHGILRHPATYEPFDPAEVGGRRRLAIGKHSGRASVRYALEQYG

SEQ ID NO: 545 - protein, 520 aa, Photorhabdus asymbiotica
MNQQVIIFDTTLRDGEQALQASLCVKEKLQIALALERMGVDIMEVGFPISSPGDFESVQTIAQQIKNSRVCALARCVEKDIDVAAEALKVAEAFRIHVFLATSNLHIESKLKKTFEDVMEMAAQSIKRARRYTDDVEFSCEDAGRTPIDNLCRIVENAIKAGATTINIPDTVGYTTPYQFGGIITNLIERVPNIDKAVLSVHCHDDLGMSVANSITAVQAGARQVEGTMNGLGERAGNCSLEEVIMAIKVRHQTLGVYTNINHQEIYRTSQLVSQLCNMPIPANKAIVGSNAFSHSSGIHQDGVLKNRETYEIMTPESIGLKEIQLNLTSRSGRAAVKHRMEEMGYQDKDYDMDNLYEAFLRLADKKGQVFDYDLEALAFINLQQQEPEFFHLDNFNIQSGSSVIATAAVRLVCGKEIKSEAATGNGPIDAIYQAISRITEYPIELVSYQLSGKGQGKNALGQVSIVVECFGRRFHGMGLETDIVESSAKAMIHALNCIWRTEQVKKEKQRIQQNTKEMV

SEQ ID NO: 546 - protein, 515 aa, Vibrio sp. Ex25
MNDQVIIFDTTLRDGEQALSASLTVKEKLQIAYALERLGVDVIEAGFPISSPGDFESVQTIAKNIKNSRVCALSRAVAKDIDAAAEALKVADQFRIHTFLATSTIHVEDKLRRSYDDVLEMAVNAVKHARNYTDDVEFSCEDAGRTPIDNLCRMVEAAINAGASTINIPDTVGYTVPSEFGGIIQTLFNRVPNIDKAIISVHCHDDLGMSVANSIAAVQAGARQIEGTINGIGERAGNCSLEEIAMIIKTRQEFLGVHTGIKHDEIHRTSKLVSQLCNMPIQSNKAIVGANAFSHSSGIHQDGMLKNKNTYEIMTPESIGLKNQALNLTSRSGRAAVKSHMDTMGYNEDEYNLDALYADFLKLADRKGQVFDYDLEALMHFSNLREEDDFYKLNYLSVQSGSVMATTSIKMQCGDEEMCEAAVGNGPVDALYQCIYRVTGYDIVLDKFDLTAKGEGEDGLGQADIIANYKGRKYHGTGVSTDIVEASGQALLHVINSIHRADKIEEMKQKKIATV

SEQ ID NO: 547 - protein, 539 aa, Microcoleus chthonoplastes PCC 7420
MNTQPNRIIIFDTTLRDGEQCPGATLNVEEKLTIARQLARLGVDVIEAGFPYASVGDFEAVQKIAQTVGVESGPTICGLARATRQDIEAAAKALKPAAHGRIHTFIATSDIHLKYKLKKTRQDVLAIAEEMVAYAKSFVEDVEFSPEDAGRSDPEFLYEVLERAIAAGATTVNIPDTVGYTTPTEFGGLIRGIKENVPNIDQAIISVHGHNDLGLAVANFLEAVKNGARQLECTINGIGERAGNAALEELVMALHVRRQFYNPYFGRPPESEESLTNIDTRQIYKTSRLVSNLTGMLVQPNKAIVGANAFAHESGIHQDGVLKNKLTYEIMDAKLIGLTDNQIVLGKHSGRNAFRSRLKELGFDLSETELNKAFVRFKEVADKKKDVSDWDLEALVNDEISQVPELFHLELVQVSCGDHARPTATVTLRTPEGEELMDAAIGTGPVDAVYKAINRVVNVPNELIEYSVQSVTAGIDALGEVTIRLRYNSRVFSGHAANTDIIVASAQAYVNALNRLYGWLQGQRQQESDRETDKAVASV

SEQ ID NO: 548 - protein, 560 aa, Synechococcus sp. PCC 7335
MTQLNSASPLSSNSESAESKPTKPEKDRVLIFDTTLRDGEQSPGATMNVAEKLAVARQLARLNVDIIEAGFPFASPGDFEAVRAIASEVGTPDGPTICGLARATTGDIEAAAKAVAPASKGRIHTFIATSDIHMKYKLKKSRSEVLAITKEMVGLASSFTSDVEFSPEDAGRSEPEFLYEVLEQAICAGATTLNIPDTVGYLTPGEFGDLIRGIRQNVPSIDQAVISVHGHNDLGLAVANFLEAVKAGARQLECTINGIGERAGNAALEELVMALHVRRQYFNPFFGLPKDSEAPLTNIRTQELYKSSRLVSNVTGMLVQPNKAIVGTNAFAHESGIHQDGVLKNRLTYEIMDAQLIGLNDNQIVLGKHSGRNAFRTRLKELGFDLGDQELNKAFLRFKDIADKKKEISDRDLEAIVNDETLQVAEHFKAELIQVSCGSNAQPTATITIRMPDGQELTDASIGTGPVDAIYRAINRIVDIPNDLIEYSVQSVTAGIDAMGEVTIRLRHDERIYSGHAANTDIVVASAYAYINALNRLYTAIQTGVSVHPQRGKVPAGTGV

SEQ ID NO: 549 - protein, 383 aa, Synechococcus sp. PCC 7335
MTLSSLTSPQTDPAHIYINDTTLRDGEQAAGIAFGLEEKVAIAKFLDAIGVQELEVGIPAMGQAEAQSIRAIANLGLNAKILGWNRAVIADIQASLNCGLQRIHISIPVSDAQIQVKFQGRWNAMLLQLRDAINFAKDHGLEVSVGGEDSSRADEQFLVDAAQFAQEWGAFRFRFCDTVGILDPFTTFEKVQKLVAALEIPVEMHTHNDLGLASANALAGVRAGASSINTTVNGLGERAGNAALEEVVMALKHIYGIKLGIRTQHLLELSRSVAKAVNCPVPPWKAIVGRNAFAHESGIHAHGVLANPSTYEPFDPIEVGRERQLVVGKHSGRHLLNQVMQGAGVSVEPGRSQSVLQAVRDQATELKRSLTLDELLVLAAKTQ

SEQ ID NO: 550 - protein, 515 aa, Alcanivorax sp. DG881
MSKDRLIIFDTTLRDGEQSPGATMDQDEKLRIARALERMRVDVIEAGFAIASQGDFRSVKAIADTVRESTICSLARAKAADIDRAAEALAGAESGRIHTFIATSPIHMQHKLRLEPDQVIEHAVAAVKHARNHMGDVEFSCEDAGRSEIDFLCRIIEAVIDAGARTINIPDTVGYAIPEQFGDTISQLLTRIPNADKAVFSVHCHNDLGLAVANSLAAVQAGARQVECTINGLGERAGNASLEEIVMAVQTRQDLFNVDTGINAREIVPTSKMVSQITGFPVQPNKAIVGANAFAHESGIHQDGVLKHRETYEIMSAEDVGWHTNRMVLGKHSGRAAFRARLDELGIVFASEAAMNEAFLRFKDLADKKHEVFDEDLQALVSDTKRAVEQERFKLVLLEASARTGETPQARIVMSIDGVEQDATATGAGPVDAAFKAIEKLADSHTALQLYSVNAITAGTDSQGEVTVRLEKGGRIVNGHGADVDIITASAKAYLNALNHFAAGVERAHPQAADV

SEQ ID NO: 551 - protein, 547 aa, Cyanobium sp. PCC 7001
MARDPGRVLIFDTTLRDGEQSPGASLNLEEKLAIAQQLARLGVDIIEAGFPFASPGDFNAVQRIAESVGTPEGPVICGLARAAAGDIKACADAVAPAAHRRIHTFIATSDIHLEHKLRKTRDEVLAITAEMVDYARSLVDDVEFSCEDAGRSDPEFMYQVIEAAIKAGATTINIPDTVGYTTPAEFGELIAGINAHVPNIDQAVISVHGHNDLGLAVANFLEAVKNGARQLECTINGIGERAGNASLEELVMALHVRRSYFNPFLGRPADSTEPLTGVRTEEITKTSRLVSNLTGMAVQPNKAIVGANAFAHESGIHQDGVLKHRLTYEIIDARTVGLADNRISLGKLSGRSAFRARLEELGYELSREDLDDAFARFKELADRKREITDRDLEAIVSEQVQQTDEGRFTLKSVQVSCGTGLQPTATVTLLTADGAEISEAAIGTGPVDAVCQALNRLAQVPNELVEFSVKSVTEGIDAMGEVTIRLRHQGVLYSGHAADTDIVVAAAQAFVNALNRLVSGSQSLPLHPQKAPLPQLGDLPLADRPRV

SEQ ID NO: 552 - protein, 518 aa, Labrenzia alexandrii DFL-11
MTATSEKDQIRIFDTTLRDGEQSPGASMTLEEKLQIAEILDEMGVDIIEAGFPIASNGDFEAVREIAKRSQNSTIAGLARAIHADIDRCGEAVKYAGKGRIHTFVSTSPIHLQFQMNKNQEEVLEIITDTVTRSRNLIDDVEWSAMDATRTPIDYLCRCVEAAIKCGATTINLPDTVGYATPDEYKAMFEQIIERVPNSDQAIFSVHCHDDLGLAVANSLAGVAGGARQIECTINGLGERAGNASLEEIVMAIRTRGDILPYETQIDPQFLVRASKMVAGASGFAVQYNKAIVGKNAFAHESGIHQDGMLKNAETYEIMRPEDVGVKATSLVMGKHSGRHAFRDKLRELGFELGDNALQDAFRRFKDLADRKKHVYDEDIEALVEDEINILGESTKVIALTVIAGTGGPQKAILTMDVDGQHVTKEATGDGPVDATFNAIKAISPHEATLSLYQVHAVTEGTDAQAEVSVRLEADGRIATGKGADTDTLVASARAYVSAMNKLAQRRQASNPGALQAV

SEQ ID NO: 553 - protein, 546 aa, Prochlorococcus marinus str. MIT 9202
MSKDPGRILIFDTTLRDGEQSPGASLNLEEKLAIAHQLARLGVDVIEAGFPFASPGDFKAVNKIANSVGKENGPIICGLARASKGDIKACYEAVSPAPKKRIHTFIATSDIHLKHKLKKSRKDVLQIVPEMVNYAKSLVDDIEFSCEDASRSDPDFLYEVIQLAISAGATTINIPDTVGFTTPSEFGKLISDINKNVPNIDEAVISVHGHNDLGLAVANFLEAVKNGARQLECTINGIGERAGNASLEELVMALHVRKSFFNKFFNRNSDSPTPLTAIRTEEITKTSRLVSNLTGMIVQPNKAIVGANAFAHESGIHQDGVLKNRLTYEIIDAKTVGLSDNKISLGKLSGRSAVRARLEEMGYDLSREDLNDAFTRFKDLADRKREITDRDLEAIVSEQVQLPEAKFQLSLVQVSCGNASKPTATISLINTEDDSEDTAVSIGTGPVDAVCEALNKLAKVPNELIEFSVKSVTEGIDALGEVTIRIRRDNKIYSGHSADTDVVVAAANAYVNALNRLVFSEKKSSIHPQFDNLENADKTLLSNPGN

SEQ ID NO: 554 - protein, 242 aa, Cymbidium goeringii
MGRGRVELKRIENKINRQVTFSKRRNGLLKKAYELSVLCDAEVALIIFSSRGKLYEFGSAGTCKTLERYQRSCLNSQATNSIDRETQSWYQEVSKLKSKFESLQRSHRNLLGEDLGPLNVKELQQLERQLETALSQARQRKTQMMLDQMEELRKKERQLGEINKQLKMKLEAGGGALRLMQGSWESDAVVEGNAFQMHPYQSSSLECEPTLHIGYHHFVPPETVIPRTPGVENNNFMLGWML

SEQ ID NO: 555 - protein, 238 aa, Prunus serrulata var. lannesiana
MGRGRVQLKRIENKINRQVTFSKRRTGLLKKAHEISVLCDAQVGLVVFSNKGKLFEYATDSCMDQILDRYERYSYAERQLVEPDFESQCNWTFEYSRLKAKVELLQRNQRHYLGEDLDSLTLKEIQSLEHQLETALKQIRLRKNQLMHESISELQKKERAMQEQNNLLAKKIKEKEKAAAEEVHNWEQQNNGLNLLPQPLPCLNMGGTQQDEFLQVRRNQLDLTLEPLYSCNLGCFAA

SEQ ID NO: 556 - protein, 510 aa, Nitrosomonas sp. AL212
MQEHLIIFDTTLRDGEQSPGASMTKEEKVRIAWQLERMGVDVIEAGFPAASNGDFEAVKAVADSVKDSMVCGLARAIETDIQRAGEALKGAQSARIHTFIATSPVHMKRKLRMSPDQVITQAVKAVNWARQYTDNVEFSPEDAGRSELDFLCRVLEAVIDAGATTVNIPDTVGYTMPDQFGTLIRNLRERVPNSDKAIFSVHCHNDLGLAVANSLTAVMNGARQVECTINGLGERAGNAALEEIVMAVRTRQDYFSCDTRIDTTHIVSASKLVSGITGFPVQPNKAIVGANAFAHESGIHQDGVLKHRETYEIMRAEDVGWGANKLLLGKHSGRNAFRNRLMELGIELESEEMLNNTFMRFKELADKKHEIFDEDLHALVSDEELVLHECFRLISLIVHSETGEIPYARVVISDNGNEMSADSEGSGPVDATFRAIEKLLLSEAKLQLYSVNNITSGTDAQGEVTVRLQKSDRIVNGHGADTDIVVASAKAYLSALNKLCSKLERAHPQV

SEQ ID NO: 557 - protein, 294 aa, Ricinus communis
MEDKDDGLGLGLSLSLGGQEKHQNQPSLKLNLMPFPSLFMQNTHHSTSLNDLFQSSDRNADTRSFQRGIDMNRMPLFADCDDENGVSSPNSTISSLSGKRSEREQIGGEEMEAERASCSRGGSDDEDGGAGGDDGSRKKLRLSKEQSLLLEETFKEHNTLNPKQKLALAKQLNLKPRQVEVWFQNRRARTKSKQTEVDCEYLKRCCENLTQENRRLQKEVQELRALKLSPQLYMHMNPPTTLTMCPSCERVAVSSSAAPSRQPPNSQPQRPVPVKPWAALPIQHRPFDTPASRS

SEQ ID NO: 558 - protein, 302 aa, Ricinus communis
MLEYEWGNPSTIMLTGEEQSQDPDQNRQIFDHYTAQSFNDNLLAQPAASLFHHPNPHQVNSLYDPRASSYTAPHHPSLLSLDPIPTHTAPCPSYFLVPKTEQVTRPQDYTSRIGLNLGGRTYFSSAEDDFVNRLYRRSRPVEPGSSNAPRCQAEGCNADLTHAKHYHRRHKVCEFHSKASTVIAAGLTQRFCQQCSRFHLLSEFDNGKRSCRKRLADHNRRRRKSHQINHDANKSHPETATNSSSENLPRSPQDSGTHNSSSSVTVAVSPPRMFLDCFRQRPYQATASSSSASSSSLFFSSG

SEQ ID NO: 559 - protein, 632 aa, Ricinus communis
MASISATTAPKFSISQITSKPSPPRISHSLLHFTPTRCRFFSNSKFSVSFPSNSRFKSSTAISCSSSAAPLSRRPEYIPSHIPDPSYVRIFDTTLRDGEQSPGATLTSKEKLDIARQLSKLGVDIIEAGFPAASKDDFEAVKTIAKEVGNAVDEDGYVPVICGLSRCNEKDIRTAWEAVKYAKRPRIHTFIATSAIHMEYKLRKSKEEVVEIARSMVKFARSLGCDDVEFSPEDAGRSDREFLYHILGEVIKAGATTLNIPDTVGITLPSEFGQLIADIKANTPGIDKVIISTHCQNDLGLSTANTLAGAYAGARQVEVTINGIGERAGNASLEEVVMAIKCRGEHILGGLYTGINPRQITMASKMVEEYTGLHLQPHKAIVGANAFAHESGIHQDGMLKHKGTYEIISPEDIGLERSNDAGIVLGKLSGRHALKDRLKELGYELNDEQLGTIFWRFKAVAETKKRVTDADLIALVSDEVFQPEIVWKLGDLQVTCGTLGLSTATVKLINADGEEHIACSVGSGPVDAGYKAVDLIVKEPVELLEYSMNAVTEGIDAIATTRVLIRREDNHTSTHALTGEPFQRTFSGSGAGMDIVVSSVKAYVGALNKMLALKQQFLTKRVSSTDRTPVSA

SEQ ID NO: 560 - protein, 443 aa, Glycine max
MECNAKSLGQWDWEHLFFFNTKAAENPRLQPTDCSSEADREINVGMLHPSGGSACSGSELIHASSSRSSKSASNNSSSNGDSKASILTLEGSHDDSTGKKELCNGEPIETSPAAVPSPVSGEPLLTLKLGKRLYFEDVCTGSDSKKPSSFDIPISSGKKHKTSSQTLQHPSCQVESCGLDLSSAKDYHRKHRVCEAHSKSPKVVITGLERRFCQQCSRFHALSEFDDKKRSCRRRLSDHNARRRKPQPDSIQLNPSALSSSPYDGRQIVSPFAFSRTATNLAWQDMHPQTKEFLPKPAKAFNKIPSIVSMLSDDSSGLLTSRGIATKSTVPDVAGMEDPIRLSDPNGTQDVNRALSLLSTNSSSSWGAYETKSLSLEHSTRATHSITQHHLPLPSSAEYWHTDHQQHSSMCISFTDCDSSNRFQDFQLLSSPYESPFPCNQLD

SEQ ID NO: 561 - protein, 241 aa, Glycine max
MGRGKIAIRRIDNSTSRQVTFSKRRNGLLKKARELSILCDAEVGLMVFSSTGKLYDYASTSMKAVIERYNKLKEETHHLMNPASEEKFWQTEAASLRQQLQYLQECHRQLMGEELTGLGIKELQNLENQLEMSLKGVRMKKDQILTNEIKELRQKGNIIHQENVELYQKMEQIQKENAELQKKVYEARSTNEENVASNPSYNVRNGYDSLASISLQLSQPQSQYKYSEPSTKAMKLGLQLH

SEQ ID NO: 562 - protein, 565 aa, Lactococcus lactis
MHTIFIVVDQGGPTLAFLAKICGSCLAIVISRTERRPHGRLFCFLIKNRGNIMRKIEFFDTSLRDGEQTPGVSFSISEKVTIAKQLEKWRISVIEAGFSAASPDSFEAVKQIADSLNDTAVTALARCVISDIDKAVEAVKGAKYPQIHVFIATSPIHMKYKLKISPEEVLKNIDKCVRYARERVEVVEFSPEDATRTELNFLLEAVQTAVDAGATYINIPDTVGYTTPEEYGKIFKFLIDNTKSDREIIFSPHCHDDLGMAVANSLAAIKAGAGRVEGTVNGIGERAGNAALEEIAVALHIRKDFYQAQSPLKLSETAATAELISQFSGIAIPKNKAIVGANAFAHESGIHQDGVLKNAETYEIITPELVGIKHNSLPLGKLSGRHAFSEKLTELNIAYDDESLAILFEKFKKLADKKKEITDADIHALFTGETVKNLAGFILDNVQIDGHKALVQLKNQEEEIYVSQGEGSGSVDAIFKAIDKVFNHQLKLISYSVDAVTDGIDAQATTLVSVENLSTGTIFNAKGVDYDVLKGSAIAYMNANVLVQKENLQGKVEQISAHDGI

SEQ ID NO: 563 - protein, 537 aa, Escherichia coli CFT073
MPEARRSKETRTQTMSQQVIIFDTTLRDGEQALQASLSVKEKLQIALALERMGVDVMEVGFPVSSPGDFESVQTIARQVKNSRVCALARCVEKDIDVAAESLKVAEAFRIHTFIATSPMHIATKLRSTLDEVIERAIYMVKRARNYTDDVEFSCEDAGRTPIADLARVVEAAINAGATTINIPDTVGYTMPFEFAGIISGLYERVPNIDKAIISVHTHDDLGLAVGNSLAAVHAGARQVEGAMNGIGERAGNCSLEEVIMAIKVRKDILNVHTAINHQEIWRTSQLVSQICNMPIPANKAIVGSGAFAHSSGIHQDGVLKNRENYEIMTPESIGLNQIQLNLTSRSGRAAVKHRMDEMGYKESEYNLDNLYDAFLKLADKKGQVFDYDLEALAFIGKQQEEPEHFRLDYFSVQSGSNDIATAAVKLACGEEVKAEAANGNGPVDAVYQAINRITDYNVELVKYSLTAKGHGKDALGQVDIVANYNGRRFHGVGLATDIVESSAKAMVHVLNNIWRAAEVEKELQRKAQHNENNKETV

SEQ ID NO: 564 - protein, 338 aa, Arabidopsis thaliana
MESSILKSPNLSSPSFGVPSIPALSSSSTSPFSSLHLRSQNHRTISLTTAGKFRVSYSLSASSPLPPHAPRRRPNYIPNRISDPNYVRIFDTTLRDGEQSPGATLTSKEKLDIARQLAKLGVDIIEAGFPAASKDDFEAVKTIAETVGNTVDENGYVPVICGLSRCNKKDIETAWEAVKYAKRPRIHTFIATSDIHLKYKLKKSKEEVIEIAKNMVRFARSLGCEDVEFSPEDAGRSEREYLYEILGEVIKAGATTLNIPDTVGITLPSEFGQLIADIKANTPGIQNVIISTHCQNDLGLSTANTLSGAHSGARQVEVTINGIGEELETLHWKRLSWP

SEQ ID NO: 565 - protein, 391 aa, Rhodobacter sphaeroides
MSRQQPRASFLPESPLAPVALCDTTLRDGEQTAGVAFTRAEKRAIAEALQAAGVAEVEVGVPAMGEEERADIRAVAAVLKTAAPVVWCRLRAEDLAAAQRTGVVRLHIGVPVSERQISAKLGKDAAWVRDKVEKLVRAASWAGHKVSVGAEDASRADPFFLAEIAHVAAEAGAIRFRISDTLGVLDPFAAHELVGRVVTRCPLPVEFHGHNDLGMATANSLAAARAGASHLSVTVNGLGERAGNAALEEVAAALEAAGRATGVALGQLCALSELVARASGRPLSPQKPIVGEGVFTHECGIHVDGLMKDRATYESADLRPERFGRSHRIAIGKHSSAAGLARALAEAGLPADAATLAALMPALRDWAAITKRAAAPEDLAALLAAQTETAR

SEQ ID NO: 566 - protein, 515 aa, Vibrio vulnificus CMCP6
MNDQVIIFDTTLRDGEQALSASLTVKEKLQIAYALERLGVDVIEAGFPVSSPGDFESVQTIARNIKNSRVCALSRAVEKDIDAAAEALKVAEAFRIHTFISTSTIHVQDKLRRSYDDVVEMGVRAVKHARKYTDDVEFSCEDAGRTPIDNLCRMVEAAINAGARTINIPDTVGYTVPSEFGGIIQTLFNRVPNIDKAIISVHCHDDLGMSVANSIAAVQAGARQVEGTINGIGERAGNCSLEEIAMIIKTRQELLGVRTGINHEEIHRTSKLVSQLCNMPIQANKAIVGANAFSHSSGIHQDGMLKNKNTYEIMTPESIGLKNQALNLTSRSGRAAVKSHMDAMGYKEDEYNLDALYQDFLKLADRKGQVFDYDLEALMHFSNLREEDDYYKLNYLSVQSGSVMATTSIKLLCGDEEKCEAAVGNGPVDALYQCIYRLTGYDIVLDKFDLTAKGEGEDGLGQADIIANYKGRKYHGTGISTDIVEASGQALLHVINSIHRADEIAEMKQKKIATV

SEQ ID NO: 567 - protein, 520 aa, Bradyrhizobium japonicum USDA 110
MAPVNKSDKDRVIIFDTTLRDGEQCPGATMTFEEKLEVAELLDDMGVDVIEAGFPITSEGDFQAVSEIARRSKNAVIAGLSRAHPADIDRCAEAVKFAKRGRVHTVIATSPLHMRVKLNKTPEQVIETSVAMVARARNQIDDVEWSAEDGTRSEMDYLCRIVEAVIKAGATTVNIPDTVGYTVPEEYTHFMKTLIERVPNSDKAVFSVHCHNDLGMAVANSLAGVVGGARQVECTINGIGERAGNAALEEIVMAINVRNDKFPYWNKIDTTQLTRASKVVSAATSFPVQYNKAIVGRNAFAHESGIHQDGVLKDASTYEIMRPEMVGLKQSSLVLGKHSGRHAFVHKLEEMGYKLGPNQLEDAFTRMKALADRKKDIYDEDIEALVDEEMAASHDRIKLTSLTVIAGTHGPQRATMKLDVDGQIKIEEAEGNGPVDAVFNCIKRLVPHEAKLELYQVHAVTEGTDAQAEVSVRLSHDGRSMTARAADPDTLVASAKAYLGALNKIVMKRQRDTVTTAAAS

SEQ ID NO: 568 - protein, 511 aa, Staphylococcus epidermidis ATCC 12228
MEEHIQIFDTTLRDGEQTPGVNFTFDERLKIAKQLEKWGVDVLEAGFPASSTGSFKSVEAIAKTLTTTAVCGLARCKKSDIDAVYEATKEAVKPQVHVFIATSPIHLEHKLKMTQDEVLTSIKEHVSYAKQFFEVVQFSPEDATRTEIPFLIECVQTAINAGATIINIPDTVGFSYPTEYGEIFKQLTQAVKSNSKIIFSAHCHDDLGMAVANSLAAIEGGARRIEGTVNGIGERAGNASLEEVALALYVRKDHYGLESQINLEETKKTSDLISRYAGIRVPRNKAIVGQNAFSHESGIHQDGVLKHRETYEIMTPQLVGVNTTELPLGKLSGKHAFAEKLKALGYEIKLEDQVTLFKQFKEIADKKKNVSDRDIHAIIHGSEHEHNAIFQLDNLQLQYVSKGLQSAVVVIKERNGQVKQDSSIGTGSIVAIYNAVDRIFKKDAELIDYRIDSVTEGTDAQAEVHVRIIINHIEVTGIGIDHDILKASCKAYIDAHAKYISEYELKEGIRT

SEQ ID NO: 569 - protein, 113 aa, Arabidopsis lyrata subsp. petraea
STGKRSEREEDTDPQGSRGISDDEDGDNSRKKLRLSKDQSVILEETFKDHSTLNPKQKQALAKQLGLRARQVEVWFQNRRARTKLKQTEVDCEFLRRCCENLTEENRRLQKEV

SEQ ID NO: 570 - protein, 390 aa, Buchnera aphidicola str. Bp (Baizongia pistaciae)
MTQKIIIFDTTLRDGEQSLKMSLSVKKKLKIAFALEKLGVDVIEAGFPISSPGDFESVKKISERIKDAKICSLARCIDGDIDIAAKAMKKANSFRIHIFLGTSALHVQSKLKKTFDQIIDMMVSSVKRAQKYTDDVEFSCEDAGRTSLDDLCRIIELAIDLGVKTINIPDTVGYTIPYEFSNIISSIYKKVPNIDKAIISVHCHDDLGMAVANSISAIQVGARQIEGTITGVGERAGNAALEEILMAIKIRKDILNFKTNIKYQEIYSTCRVISSICNIPVPVNKAIIGSNAFSHSSGIHQDGILKDKKTYEIIVPESIGFVSQPLNLTSRSGRAAVKYRMKKIGYKDSDYNIDILYSRFLKLADKKGRVSDSDLKQLVCFNNKLKNLKD

SEQ ID NO: 571 - protein, 519 aa, Xylella fastidiosa Temecula1
MNTSISSQPPCIRIFDTTLRDGEQSPGCSMPAQQKLVMARALDALGVDIIETGFPASSQSDYEAMTLIARELRRPTLAVLSRCLQADIETSARALESATKPRLHVFLSTSPLHREHKLRMSKEQVLESVHKHVSLSRTLIDDVEFSAEDATRTEEDFLIEVTRVAIAAGATTINLPDTVGFSTPEEIRNMFTRVIANVEGANKVIFSAHCHDDLGLAVANSLAAIEGGARQIECTINGIGERAGNCALEELTMVLKVRNAFYNIDTSIHTSRIVSTSQLLQRLVGMPVQRNKAVVGANAFAHESGIHQHGMLRHRGTYEIMRPQEVGWVCSHMVLGRHSGRAAVEQRLRALGYLLEEEDLKLVFEEFKQLCEKQRLVTDVDLQVLMQDTTVQHGYRLASMTISDVGNRANALVELSDPQGQRVAETAQGNGPVDALFGALAAATGVKLELDSYQVHSVGIGADARGEANLSVRHNDTQYEGTGTSKDIIEASALAWLEVANRLLRNPENMQNKQNTALA

SEQ ID NO: 572 - protein, 260 aa, Lolium perenne
MGRGRVELKRIENKINRQVTFSKRRNGLLKKAYELSVLCDAEVALIIFSSRGKLYEFGSAGTTKTLERYQHCCYNAQDSSSALSETQSWYQEMSKLKAKFEALQRTQRHLLGEDLGPLSVKELQQLEKQLECSLSQARQRKTQLMMEQVEELRRKERQLGEINRQLKHKLDAEGSSSNSFRAMQQITWAAGTVVDEGAGAYHMHHQQQPNHSAAMDCEPTLQIGYPHQFAAAEQAANNIPRSSAPGGENNFMLGWVLGAN

SEQ ID NO: 573 - protein, 515 aa, Vibrio parahaemolyticus RIMD 2210633
MNDQVIIFDTTLRDGEQALSASLTVKEKLQIAYALERLGVDVIEAGFPISSPGDFESVQTIAKHIKNSRVCALSRAVAKDIDAAAEALKVADQFRIHTFLATSTIHVQDKLRRSYDDVLEMAVNAVKHARNYTDDVEFSCEDAGRTPIDNLCRMVEAAIDAGASTINIPDTVGYTVPSEFGGIIQTLFNRVPNIDKAIISVHCHDDLGMSVANSIAAVQAGARQIEGTINGIGERAGNCSLEEIAMIIKTRQELLGVSTGIKHEEIHRTSKLVSQLCNMPIQSNKAVVGANAFSHSSGIHQDGMLKNKNTYEIMTPESIGLKNQALNLTSRSGRAAVKSHMDSMGYKEDEYNLDALYADFLKLADRKGQVFDYDLEALMHFSNLREEDDFYKLNYLSVQSGSVMATTSIKMQCGDAEMCEAAVGNGPVDALYQCIYRVTGYEIVLDKFDLTAKGEGEDGLGQADIIANYKGRKYHGTGVSTDIVEASGQALLHVINSIHRADTIAEMKQKKIATV

SEQ ID NO: 574 - protein, 289 aa, Aster yellows phytoplasma
MHTGIGTSPYHIKYKFNSTPKKIIDIAIEAVKYAKKFVEDVEFYAEDAGRTENIFLAQICEAVIKAGATVINIPDTTGYCLPEEYAEKIKFLKENVDSIDKVTISTHCHDDMGLSTANSIAGIINGAQQIECTINGIGERAGNTSLEEVVMIIKQHKDLNFYTKINTKLLYKTSKLVSECTSMFVQSNKAIVGANAFSHSSGIHQDGLIKKRETYEIIDPKDVGVNKSSIILTARSGRSALAYRYQKLGYSFNKSKLNVIYSLFLKYADKKKEIDDEDLKKILKKMKYS

SEQ ID NO: 575 - protein, 147 aa, Xanthomonas smithii subsp. smithii
MSQQVIIFDTTLRDGEQALQASLSVKEKLQIALALERMGVDVMEVGFPVSSPGDFESVQTIARQVKNSRVCALARCVEKDIDVAAESLKVAEAFRIHTFIATSPMHIATKLRSTLDEVIERAIYMVKRARNYTDDVEFSCEDAVTSS

SEQ ID NO: 576 - protein, 147 aa, Xanthomonas vasicola
MSQQVIIFDTTLRDGEQALQASLSVKEKLQIALALERMGVGVMEVGFPVSSPGDFESVQTIARQVKNSRVRALARCVEKDIDVAAESLKVAEAFRIHTFIATSPMHIATKLRSTLDEVIERAIYMVKRARNYTDDVEFSCEDAVTSS

SEQ ID NO: 577 - protein, 499 aa, Bacteroides thetaiotaomicron VPI-5482
MDTTLRDGEQTSGVSFVPHEKLMIARLLLEDLKVDRVEVASARVSEGEFEAVKMICDWAARRNLLQKVEVLGFVDGHTSVDWIQRTGCRVINLLCKGSLKHCTQQLKKTPEEHIADIINVVHYADEQDIGVNVYLEDWSNGMKDSPEYVFQLMDGLKQTSIRRYMLPDTLGILNPLQVIEYMRKMKKRYPNTHFDFHAHNDYDLAVSNVLAAVLSGVRGLHTTINGLGERAGNAPLSSVQAILKDHFNAMTNIDESRLNDVSRVVESYSGIVIPANKPIVGENVFTQVAGVHADGDNKNNLYCNDLLPERFGRKREYALGKTSGKANIRKNLEDLGLELDEDAMRKVTERIIELGDKKELVTQEDLPYIVSDVLKHGAIGEKVKLKSYFVNLAHGLKPMATLKIEINGKEYEESSSGDGQYDAFVRALRKIYKVTLGRKFPMLTNYAVSIPPGGRTDAFVQTVITWNYDEQVFRTRGLDADQTEAAIKATMKMLNLLEE

SEQ ID NO: 578 - protein, 498 aa, Bacteroides thetaiotaomicron VPI-5482
MDNRLFIFDTTLRDGEQVPGCQLNTVEKIQVAKALEALGVDVIEAGFPISSPGDFNSVIEISKAVTWPTICALTRAVQKDIDVAVDALKFAKHKRIHTGIGTSDSHIKYKFNSNREEIIERAVAAVKYARRFVDDVEFYAEDAGRTDNEYLARVVEAVIKAGATVVNIPDTTGYCLPSEYGAKIKYLIDHVDGIDNAILSTHCHNDLGMATANTIAGVLNGARQVEVTINGIGERAGNTALEEIAMIIKSHHEIDIQTNINTQKIYPTSRMVSSLMNMPVQPNKAIVGRNAFAHSSGIHQDGVLKNVETYEIIDPHDVGIDDNSIVLTARSGRAALKNRLSLLGVNLDQEKLDKVYEEFLKLADKKKDINDDDVLVLAGADRSQNHRIKLEYLQVTSGVGVRSVASLGLNISGEKFEACASGNGPVDAAIKALKKIVDRHMTLKEFTIQAISKGSDDVGKVHMQVEYDNQIYYGFGANTDIIAASVEAYIDCINKFKA

SEQ ID NO: 579 - protein, 256 aa, Selaginella remotifolia
ETWLVTTTSSSNPEVGLATGLAATGGAQDLLNPPLNKQKEPPVGRGKIEIKRIENATSRQVTFSKRRGGLLKKAHELSVLCDAQVALIIFSSTGKLFEYASTSMKEILDRYGKYPESVQGGNMASHHEASDFISHEIRRLKQQLQRSQQSRRHLLGDDLSHLPIKDLQNLEQQLEVGLSRVRSRKDQVLMDQVDELRRRELTLHKDNEMLRRRLSDVQGMAESGRSTLIVNPWRQGNLLQTWQMYPCHFLDTKAAA

SEQ ID NO: 580 - protein, 234 aa, Arabidopsis thaliana
MGRGKIVIRRIDNSTSRQVTFSKRRSGLLKKAKELSILCDAEVGVIIFSSTGKLYDYASNSSMKTIIERYNRVKEEQHQLLNHASEIKFWQREVASLQQQLQHLQECHRKLVGEELSGMNANDLQNLEDQLVTSLKGVRLKKDQLMTNEIRELNRKGQIIQKENHELQNIVDIMRKENIKLQKKVHGRTNVIEGNSSVDPISNGTTTYAPPQLQLIQLQPAPREKSIRLGLQLS

SEQ ID NO: 581 - protein, 313 aa, Ceratopteris richardii
MAMPCSDIDLLDSDNDNVDDQHISLELRQVHEDTDDGSHDEPRELSLLNHESNLCKIVNSKGKGAEAGNSLLPSTGTSRGKIQIRRIENTTSRQVTFSKRRNGLLKKAHELSVLCDAEIALIIFSSTGKLFEYSSSRGIKKILERYKRCSGILQDVGGTVIRDVEYWKQEAERLKERLTYMEEIQRNMLGESLGSLQIKDLQNLEAKLDSGLYKIRGAKTQLMARQVQELQKKEQILLQQNEALRAKLAELSCLQAPVSGLTTATTSQDVQESSSGRGSRQRETSLSAAETTLQLASHNEQTFLLRAVPHMRL

SEQ ID NO: 582 - protein, 236 aa, Ceratopteris richardii
TQKASELGNIHRKSAVSLLSDMSLDKSDTNINASGVTHSPLETESDTRSNLQSSNQPPYRSPRIAIRRVDNATNRQVTFSKRRNGLLKKASELSILCDAEIAAIVFSSTGRLSEFASSSMDKIIRRYEDLQSQSASRALLHQREYWKNQALHLRRQVGCMNDIQSCIMGENAAALSLDELQNTEARLQIALDKIRTRRNELLAMQTQNIISKGNGLWIENTLLRKRSTSAYDGEMP

SEQ ID NO: 583 - protein, 502 aa, Bacillus cereus ATCC 14579
MFMDTTLRDGEQSPGVNLNEQEKLQIARQLERLGIHVMEAGFAAASEGDFQSVKRIANTIQNATVMSLARAKESDIRRAYEAVKGAVSPRLHVFLATSDIHMKYKLCMSKEDVLNSIHRSVTLGKSLFPTVQFSAEDATRTSRAFLAEAVEIAIRAGANVINIPDTVGYTNPEEYYSLFEYLQESVPSYEKAIFSCHCHDDLGMAVANSLAAVEGGALQVEGTINGIGERAGNAALEEVAVALHIRKDFYKAEPSMTLKEIKATSILVSRLTGMVVPKNKAIVGANAFAHESGIHQDGVLKEVTTYEIIEPALIGESQNLFVLGKHSGRHAFTEKMKELGYEFTNEERDAAFEAFKKLADRKKEITEEDLRALMLGEAAFAAQQYNITQLQVHFVSNSTQCATVVLKDEEGNVYEDAATGSGSIEAIYNAIQRILGLECELADYRIQSITQGQDALAHVHVELKEGSHQISGFGVAQDVLEASARAYVHAAGKLKSLIALVK

SEQ ID NO: 584 - protein, 175 aa, Draba nemorosa var. hebecarpa
MVRGKTQMKRIENATSRQVTFSKRRNGLLKKAFELSVLCDAEVSLIIFSPKGKLYEFASSNMQDTIDRYLRHTKDRISSKPVSEENMQHLKHEAANMMKKIEQLEASKRKLLGEGIGTCSIEELQQIEQQLGKSVKCIRARKTQVFKEQIEQLKQKEKALAAENEKLSEKWGSNE

SEQ ID NO: 585 - protein, 510 aa, Nitrosomonas europaea ATCC 19718
MKEHLVIFDTTLRDGEQSPGASMTMEEKVRIARQLERMGVDVIEAGFPAASRGDFEAVRAVAEAVSNSTVCGLARAMEADIDRTGEALQVNQNVRIHTFIATSPIHMKNKLRMSPDQVIDQAIKAVKWARQYTDNVEFSPEDAGRSEIDFLCRVLEAVIDAGARTLNIPDTVGYTMPDQFGGLIRTLRERIPNSDKAIFSVHCHNDLGLAVANSLSAVMNGARQVECTINGLGERAGNAALEEIVMAVRTRQDYFPCDTRIDTTQIVPASKLVSGITGFPVQPNKAIVGANAFAHESGIHQDGVLKHRETYEIMRAEDVGWGANKLLLGKHSGRNAFRSRLKELGIGLESEEKLNAIFLRFKDLADKKHEIFDEDLHALVSDEAQIPEEHYRLLSLHAVSETGEIPSAQVVIAVGGSEKQAVSEGSGPVDATFRAIEKILDSKVELQLFSVNNITSGTDAQGEVTVRLQKAGRIVNGHGADTDIIAASAKAYLSACNKLHSSLERTHPQI

SEQ ID NO: 586 - protein, 506 aa, Bacillus anthracis str. Ames
MKQILFMDTTLRDGEQSPGVNLNEQEKLQIARQLERLGIHVMEAGFAAASEGDFQSVKRIANTIQNATVMSLARAKESDIRRAYEAVKGAVSPRLHVFLATSDIHMKYKLCMSKEDVLDSIYRSVTLGKSLFPTVQFSAEDATRTARDFLAEAVEVAIRAGANVINIPDTVGYTNPEEYYALFKYLQESVPSYEKAIFSCHCHDDLGMAVANSLAAVEGGALQVEGTINGIGERAGNAALEEVAVALHIRKDFYKAEPSMTLKEIKATSTLVSRLTGMVVSKNKAIVGANAFAHESGIHQDGVLKEVTTYEIIEPALVGESQNLFVLGKHSGRHAFTEKMKELGYEFTNDERDAVFEAFKKLADRKKEITEEDLRALMLGEAAFAAQQYNITQLQVHFVSNSTQCATVVLKDEEGNVFEDAATGSGSIEAIYNAIQRILGLECELADYRIQSITQGQDALAHVHVELKEGAHQVSGFGVAQDVLEASARAYVHAAGKLKSFIQLVK

SEQ ID NO: 587 - protein, 515 aa, Haemophilus influenzae Rd KW20
MTDRVIIFDTTLRDGEQALKASLTVKEKLQIALALERLGVDVMEVGFPVSSQGDFESVQTIARHIKNARVAALSRAVDKDIDAAYEALKVAEAFRIHTFIASSALHVEAKLKRSFDDVVGMAVAAVKRARNYTDDVEFSCEDAGRTGIDNICRIVEAAINAGATTVNIPDTVGFCLPNEYGNIIAQVRNCVPNIDKAVISVHCHNDLGMATANSLTAVQNGARQIECTINGIGERAGNTSLEEVVMAMKVRQDFMGVDTHINTQEIHRVSQMVSQLCNMPIQPNKAIVGSNAFAHSSGIHQDGMLKNKNTYEILSPETIGLKKEKLNLTARSGRAAVKGHMADMGYNEQDYDLDKLYDEFLKLADKKGQVFDYDLEALAFIDMQQGDEDRLVLDKLSAHSTKEYPATAFVQLKLDGEKLSTSSIGGNGPVDAVYNAILNLTGLEIKMSHYNLTAKGEGAEALGQVDIVVEHKGRKFHGVGLATDIVESSALALVHAINAIYRAHKVADIKNHKHH

SEQ ID NO: 588 - protein, 304 aa, Leptospirillum ferrooxidans
MDEERREGGEAADSGFGPVFVDTTIRDGGQSPGVFFDRPTKMVIVTTLSRIGVQEIEVGTPCLGDHEIEDLRALLSLPVPVELFPWLRPLEADFESALGLGFKRVHVSFPTSDAHRASVQNMGRPDIVERVRKTVLRMTGEGCRVSIGLEDASRAPMDFLKEFIAAVRESGGIRVRYCDTVGKHHPAEIIERISELSKEGLPIEIHCHNDLGMATANTVSACHSGARYLSTTVTGVGERAGNAAMEEVAFALACERGDPSLPESSAIDLPGLAHISRWLYGAIRRTLSPYRPIVGSRIFHHSSG

SEQ ID NO: 589 - protein, 145 aa, Arabidopsis thaliana
MGRGKIAIKRINNSTSRQVTFSKRRNGLLKKAKELAILCDAEVGVIIFSSTGRLYDFSSSSMKSVIERYSDAKGETSSENDPASEIQFWQKEAAILKRQLHNLQENHRQMMGEELSGLSVEALQNLENQLELSLRGVRMKKVLML

SEQ ID NO: 590 - protein, 562 aa, Rhodopirellula baltica SH 1
MPECMCGGCDSGAPKFIFFPFRDCSPMSDQPTPDAMNQSAEAPSSENVATRQIRIFDTTLRDGEQSPGASMNLAEKLEVASALVDLGVDIIEAGFPIASPGDFESVRQIATTIRGATICGLARCAEKDIDRAWEALKTAPQARIHVFLATSAIHREFKLRMTPDEIVERAVAGVRRAASHCDDVEFSPEDACRTEHDFLCRVVEAAIDAGATTINVPDTVGYTTPGEIYDRFKMLRDRVPNMDKAVLSTHCHDDLGMAVANSLAAVDAGAGQIECTINGIGERAGNAALEELVMAMKTRQDFYHCQTNINSKRLVPVSRLVSKTTGINVQRNKAIVGRNAFAHESGIHQDGMLKERTTYEIMSPEEVGFTKTDLVLGKHSGRAALADRAKQLGMTLTGEQLQEVFEAFKELADKKKEIYDGDIVALVQQKISETVAPEWTLVDYEVTSGKNQTPNVRVTLRRDEQDITEQVAQGDGPIDAAFWAVEKITGIQVVCKDFRVRSATLGRDAIGEVNLEVEHEGKTYRGTGVSTDSVESTILAMLNAINRIVAGIASDPGELPQP

SEQ ID NO: 591 - protein, 236 aa, Heuchera americana
VQLRRMENKINRQVTFSKRRGGLVKKAHEISVLCDVEVALIVFSNKGKLFEYSTDSCMEKILERYERYSYAERRLVATGSESQENWSLEYTKLKAKIELLQRSQRQFMGEDLDLLSLRELQNLEQQLDTALKHIRSRKNQLMNQSISDLQKKEKAIQEQNNLLAKKIKEKEKAMSQQAEWEQQNNGASTSNFLNPQPLPCLNISSTYQGGAQPEAMRRNELDLTLEPIYSCHLGCF

SEQ ID NO: 592 - protein, 242 aa, Syringa vulgaris
  misc_feature (188)..(188): Xaa can be any naturally occurring amino acid
  unsure (1)..(242): unsure at all Xaa locations
LVQLRRMENKINRQVTFSKRRNGLLKKAYELSVLCDAEVGLIIFSSRGKLYEFGSAGMTATLERYQRCCFNPQNAGAGAERETQSWYQEVSKLKAKYESLQRTQRHLLGEDLGPLNVKELENLEKQLEGSLSQARQRKTKIMMEQMEDLRRKERQLGEMNKQLKIRVSLELSSHETEGQGLRGFPCQXNAAASAGTSNFMAQPGTNPMEFEPEPVLQMGYHHYNLGEGPLFQDHGYRSFDLF

SEQ ID NO: 593 - protein, 383 aa, Ceratopteris richardii
MNTFLSSGPHTYLNNLRCGEWGSGTAPGPIADPKSAAYYRDHTKNDKVNDLSNRLHSYGPPEALQYPNQHAIAADTEKMEVENSGKMAASVERSAQDAHASGALQEDVVAAYVDNMPACVAGVTLVPQGGRGTIPIRRIDNPTSRQVTFSKRRNGLLKKAYELSVLCDAEVGVMVFSATGRLSEFASTSMQKVLERYQEHSNGAPSRKVLLQDVEFWKREVLFLRDQLFHLKNYENHILGENQIPLDLAEIQRVETRLENALNKIRIQKVQVLHGEMQQIYKQEARLFEENNILRKKLAEATTINGMRGSMSTMTMSHEDLPGSTNQSYGTKALQGGCPSDTSTTTSNDPNHHSSHPPSHPSASQPLTLHLTSPCSPKLDLRL

SEQ ID NO: 594 - protein, 536 aa, Prochlorococcus marinus subsp. marinus str. CCMP1375
MAKDPGRVLIFDTTLRDGEQSPGASLNLEEKLAIAQQLARLGVDIIEAGFPYASQGDFKAVQRIADQVGGEEGPIICGLARASKADIKACAEAIAPAPRKRIHTFIATSDIHLKHKLRKSRADVLKIVPEMVGYARSLASDVEFSCEDAARSDPDFMYEVIESAIAAGAGTINIPDTVGYITPAEFGDLIIGINKNVSNIDESILSVHGHNDLGLAVANFLEAVKNGARQLECTINGIGERAGNAALEELVMALHVRRRYFNPFFGKDSESPTPLTAIRTEEITKTSRLVSNLTGMVVQPNKAIVGANAFAHESGIHQDGVLKNPLTYEIVDAKTVGLAENRISLGKLSGRSAVRARLEELGYDLTREDLNDAFARFKDLADRKREISDRDLEAIVSEQVMQPEARFKLHLVQVSCGTALRPTATVTIADQDGIENTAVALGTGPVDAVCKALRSLTNEKNDLIEFSVKSVTEGIDALGEVTIRLRRDGKIFSGHSADTDVVVAAAQAYINALNRLVYSLKKSSLHPQHDVVKANL

SEQ ID NO: 595 - protein, 519 aa, Candidatus Blochmannia floridanus
MHQQVIIFDTTLRDGEQSLQTSLSVKEKLQIAFALEKLGVDVMEVGFPISSPGDFESVHTIAQNIQNSCVCGLARCLEKDIDIAAEALKSAKKFRIHIFLPTSAIHIQSKLRKNFDQIIDMTTHSIRYARKYTDDVEFSCEDAGRTSIDNLCRIVEIAIKSGARTINIPDTVGYTIPNQFSEIIYSLYKKVPIIDQAIISVHCHDDLGMAVGNSISAIQAGARQIEGTINGIGERAGNTALEEIIMAIKIRHDLLHVYTNIHHHEIYQTSQVVSQLCNMPIPANKAIVGSNAFSHSSGIHQDGVLKNKKNYEIMNPKNIGLKKVQLNLTSRSGRAAVKYHMEKMGYQEHDYNIDELYKVFLKLADQKGRVFNYELEALAFTKYSQEYLEYFALESFHIHSTSSALSNAIINLYCGKEKKIHSCSTTGRGPIDAAYKALTLISKLPIKLEKYQLHSKKYEYNILGQVNIIVSYQGRHFHGIGSNIDIIKASIIAMIQALNNIWQTKQITINHKNTQHIKK

SEQ ID NO: 596 - protein, 546 aa, Prochlorococcus marinus subsp. pastoris str. CCMP1986
MSKDPGRILIFDTTLRDGEQSPGASLNLEEKLAIAHQLARLGVDVIEAGFPFASPGDFKAVNKIAEVVGGENGPIICGLARASTNDIKACYEAISPAPKKRIHTFIATSDIHLKHKLRKTRSDVLCIVPEMVSYAKSLVDDIEFSCEDASRSDPEFLYEVIQLAITSGATTINIPDTVGFTTPSEFGKLIFDINKNVPNIDEAIISVHGHNDLGLAVANFLEAAKNGARQLECTINGIGERAGNASLEELVMALHVRKSFFNSFFGRSSDSPTPLTAIRTEEITKTSRLVSNLTGMNVQPNKAIVGANAFAHESGIHQDGVLKNRLTYEIIDAKTVGLNDNKISLGKLSGRSAVRARLEEMGYDLSREDLNDAFARFKELADRKREITDRDLEAIVSEQVQLPESKFQLSHVQVSCGSTSKPTATVTLINTEDHTEDTAVAIGTGPVDAVCEALNALTKVPNELIEFSVKSVTEGIDALGEVTIRIRNKNKIYSGHSADTDVVVAAANAFVNALNRLVFSEKKNSIHPQFDDLENPKNKVLSNPKK

SEQ ID NO: 597 - protein, 540 aa, Prochlorococcus marinus str. MIT 9313
MAKDPGRVLIFDTTLRDGEQSPGASLNLEEKLAIAQQLARLGVDVIEAGFPFASQGDFAAVQRIAQQVGGDEGPIICGLARASRADIKACADAVAPAPRRRIHTFIATSDIHLEHKLRKSRAEVLAIVPEMVAYARSLVDDVEFSCEDAARSDPEFLYEVIEAAIAAGAGTINIPDTVGFTTPSEFGALIAGIDCHVPNMNEAVISVHGHNDLGLAVANFLEAVKSGARQFECTINGIGERAGNAALEELVMALYVRRRYFNPFFGREPDSPTPLTAVRTEEITKTSRLVSNLTGMVVQPNKAIVGSNAFAHESGIHQDGVLKNRLTYEIVDARTVGLSDNRISLGKLSGRSAVRARLEELGYDLTREDLDEAFARFKDLADRKRDITDRDLEAIVSEQVQQSEARFQLRLVQVSCGSSLRPTATVILAQEDGQEQTAAAVGTGPVDAVCRALNALAGEPNELIEFSVKSVTEGIDAMGEVTIRLRRDGQLFSGHSADTDVVVAAAQAFVNALNRLVAGCGRQSLHPQHDAVLADLRSGI

SEQ ID NO: 598 - protein, 540 aa, Synechococcus sp. WH 8102
MAKDPGRVLIFDTTLRDGEQSPGASLNLEEKLAIAQQLARLGVDVIEAGFPFASAGDFAAVQRIAQQVGGENGPIICGLARASQRDIKACAEAVSPAPRRRIHTFIATSDIHLEHKLRKSRADVLGIVPEMVSYARSLMDDIEFSCEDAGRSDPEFLYEVIEAAIAAGATTINIPDTVGYTTPSEFGDLIAGINRYVPNIGEAVLSVHGHNDLGLAVANFLEAVKNGARQLECTINGIGERAGNASLEELVMALHVRRRYFNPFFGRDQDSPTPLSAVRTEELTKTSRLVSNLTGMVVQPNKAIVGANAFAHESGIHQDGVLKNRLTYEIIDAKTVGLSDNRISLGKLSGRSAVRARLEELGYDLTREDLDEAFARFKDLADRKREITDRDLEAIVSEQVQQPEARYQLQLVQVSCGTRLKPTATVALSEENGPDQTVSAVGTGPVDAVCRALNQLAGVPNELIEFSVKSVTEGIDAMGEVTIRLRRDGSLYSGHAADTDVVVAAAMAFINALNRLVAAQEHQPLHPQRDAVVLDARPTL

SEQ ID NO: 599 - protein, 238 aa, Petunia x hybrida
MGRGKIVIQRIDNTTSRQVTFSKRRSGLLKKAKELSILCDAQVGLIIFSSTGKLYEFASNSMRSVIERYYKMKEEHHLMSPMSEVKYWQREVASLRQQLHYLQENHRQLLGEKLSGLGIKDLTHLENKLEMSLKGVRKQKEQILTDEIKEITRKGNLIHQENIELYKKVNLIRQENTDLQKKVYEKGCGSEPNEGVQATFAISNGYDLHAPIYLQLRPPQTQKNQTSTSVMQFGLQLH

SEQ ID NO: 600 - protein, 512 aa, Chromobacterium violaceum ATCC 12472
MGDRLYIFDTTLRDGEQSPGASMSKEEKIRIARQLERLGVDIIEAGFAAASPGDFDAIHAIAETIKDSTVCSLARANERDVRAAGEAIKPAARGRIHTFIATSPIHMEKKLRMSPDEVVDAAVKAVKIAREYTDDVEFSAEDALRSDIDFLARIFGEVIKAGATTLNVPDTVGYAVPRLTEAFFRELIARTPGGDKVVWSAHCHNDLGMAVANSLAAVLGGARQVECTINGLGERAGNASLEEVVMAVKTRRDVFGVDSRVDATQIVPASKLVSTVTGYPVQPNKAIVGANAFAHESGIHQDGVLKHRETYEIMSAESVGWSANRLTLGKLSGRNAFKTKLSELGIVLDSEEALNAAFARFKELADKKREIFDEDLHALVSDEMVTIEREDYKLVSLKVVSETGEPPLASIVFVEHGQEQHGESSGSGPVDAAFKAIEKVVGSGAELELYSVNAITKGTESQGEVTVRLSREGRIVNGQGADTDIIVASAKAYLSALNKLTIEEKMNAQAAA

SEQ ID NO: 601 - protein, 519 aa, Wolinella succinogenes DSM 1740
MSAEMIKIFDTTLRDGEQSPGASMNTEEKIRIAKQLERLGVDVIEAGFAAASPGDFDAISKIASAVSESTICSLARAVEKDIKAAADSLAPAKLKRIHTFIATSPIHMEYKLRMTPSEVIKRAVEAIAYAKSFMEDVEFSCEDAGRSDVGFLKEILAAVIEAGAGTLNIPDTVGYRLPHEMGAIIKELHEFVGNRAILSVHCHNDLGLAVANSLYCIQSGARQVECTVNGLGERAGNAALEEIVMAIKTRRDIFGGLDTRINTKEIYASSQLVANITGIRPQPNKAIVGKNAFAHESGIHQDGVLKHKETYEIMHASDIGLGEQESIVLGKHSGRHAFKDKIKALGFEVSYEELNAAFDRFKALCDQKKEIYDEDIRAILAEETSHIPKVYELVGIQLSDCSMGRPYAAITLKKEGSEEIVDAAIGNGSVDALFKTIDRISQIKGELKDYKVEAVTQGKDALAKVVVKVEFEENKPAIIGHGLHIDTMLATAKAYVGALNSYLSMRELMGKKKCEEERI

SEQ ID NO: 602 - protein, 376 aa, Wolinella succinogenes DSM 1740
MITINDTTLRDGEQAPTVAFTQEEKCEIAKLLYEAGADELEIGIPAMGEAEREDIRAILSLGLPLRLMSWNRATQSDLEASLACGMKAVDLSIPVSTKMVAAKFRGKYAKVLSNLEETLTIAKKEGLFVCVGMEDTSRANARFLKEVIALAMERGADRVRFCDTVGILTPLQTYRAIRSLRRHCTLPVEMHCHNDYGMAVANSIAGIEAGAQSVNTTVIGIGERAGNAGFEQVLLSLIGQFGQNRTLDSTILKALVQKVAKAAGVALAPTAPVVGSRLFWHESGIHADGNQKSEGLYEPFSPELVGASREYPIGKHSGSANLIYHLKQFVPLIEKGEASDLLPLVREIVTKNKKPLSAKELFCLYLSHKRHSQKEG

SEQ ID NO: 603 - protein, 217 aa, Pimpinella brachycarpa
MVRGKTQMRRIENATSRQVTFSKRRNGLLKKAFELSVLCDAEVALIIFSPRGKLHEFASSSMHETIERYRKHTKDVQSNNTPVVQNMQHLKHETASLAKKIELLEVSKRKLLGEGLGTCSINELQQIEQQLEKSVCTVRARKMQVFKEQIEQLKEKEKTLAADNAILLAKYDVQPRQESPEDGGNLTSTTENSENSDVETELFIGPPEKRFKRIMEK

SEQ ID NO: 604 - protein, 241 aa, Asparagus officinalis
MGRGRVELKRIENKINRQVTFSKRRNGLLKKAYELSVLCDAEVALIIFSSRGKLYEFGSAGTSKTLERYQRCCYTSQDAAIASHETQSWYQEVSKLKAKFESLQRSQRHLLGEDLGPLSVKELQQLERQLESALSQARQRKTQIMLDQMEELRKKERHLGEINKQLKAKLEAEGASFRAIQGSWESEAGVGGNAFSMHPSQSSAMDCEPTLQIGYHHLVQPEAALPRSSGGENNFMLGWVL

SEQ ID NO: 605 - protein, 128 aa, Gossypium barbadense
TATVKLIGADGEEHVACSVGTGPVDSAYKAIDLITKEPVTLLEYSMNAVTEGIDAIATTRVLIRAEKSRISTNILTGEIVQRTFSGTGAGMDIVVSSVKAYIGALNKMLGLKEQYQTKASIERTPVSA

SEQ ID NO: 606 - protein, 538 aa, Gloeobacter violaceus PCC 7421
MFQDRLIIFDTTLRDGEQSPGATLNADEKVEIARQLARLGVDVIEAGFAYASPGDFEAVERVARTVGTEDGPVICSLARAIRSDIQAAAEAIRPAARGRIHTFISTSDIHLEHQLRKSRAEVLAIAAEMVAFAKGFVDDVEFSPMDAGRSAPEYLYRVLEAAIAAGATTVNIPDTVGYLTPAEFGGLIRGITQNVRGIERAVISVHCHNDLGLAVANSLAAIENGARQIECTVNGIGERAGNCSLEEIVMALHVRRQFFNPIFGRPADSTVPLSTIDTRQIYKSSRLVSHLTGMLVQPNKAIVGANAFAHESGIHQDGVLKNRLTYEIMDAETVGVNENRIVLGKHSGRNAFRTRLVELGYELGDADLNRAFLRFKELADKKKTVSDWDIEAVISDEIRLIPEAYRLEQVQVSCGEPGLPTATVRLTGPDGVERVDAAVGTGPVDAVYKAINRLIELPNELIEFSVQSVTAGIDAMGEVTIRVRQDGRTFSGHAANTDIIVASARAYLNALNKLHFALAHPTHSGGALAHPDAAAQKL

SEQ ID NO: 607 - protein, 520 aa, Photorhabdus luminescens subsp. laumondii TTO1
MNQQVIIFDTTLRDGEQALQASLCVNEKLQIALALERMGVDIMEVGFPVSSPGDFESVQTIAKQIKNSRVCALARCVEKDIDVAAEALKVADAFRIHVFLATSDLHIESKLKKTFENVMEMATQSIKRARRYTDDVEFSCEDAGRTPIDNLCRIVENAIKAGATTINIPDTVGYTTPYQFGGIITNLIERVPNIDKAIISVHCHDDLGMSVANSITAVQSGARQIEGTINGLGERAGNCSLEEVIMAIKVRQQMLGVYTNINHQEIYRTSQLVSQLCNMPIPANKAIVGSNAFSHSSGIHQDGVLKNRETYEIMTPESIGLKEIQLNLTSRSGRAAVKHRMEEMGYQDKDYDLGSLYEAFLRLADKKGQVFDYDLEALAFINLQQQEPEFFHLDNFNIQSGSNVMATAAVCLVCGKELKSEAATGNGPVDAVYQAISRITEYPIELVSYQLSGKGQGKNALGQVNIVVECFGRRFHGMGLETDIVESSAKAMVHALNCVWRTEQVKKEKQRIQQNTKEMV

SEQ ID NO: 608 - protein, 237 aa, Saururus chinensis
MGRGRVQLKRIENKINRQVTFSKRRTGLLKKAHEISVLCDAEVALIVFSTKGKLYDYSTNAGMARILERYERYCYAEREVAVTSPDSEGSWWLEYGKLKARIEAQQRIQRQLMGEDLDALTPKELQQLENQLESALKHVKSRKNQVIYDSMVELRRKEKLLRDENTMMEKKIQEKKKERVQQAQWEQQIQSQNSPSFLPTLNIGYHQGTATETGEKEEAHPGHNTVMLAWLLRSSNN

SEQ ID NO: 609 - protein, 506 aa, Arabidopsis thaliana
MASSLLTSSVMIPTTGSTVVGRSVLPFQSSLHSLRLTHSYKKPALFISCCSSVSKNAATSSTDLKPVVERWPEYIPNKLPDGNYVRVFDTTLRDGEQSPGGSLTPPQKLEIARQLAKLRVDIMEVGFPGSSEEELETIKTIAKTVGNEVDEETGYVPVICAIARCKHRDIEATWEALKYAKRPRILVFTSTSDIHMKYKLKKTQEEVIEMAVSSIRFAKSLGFNDIQFGCEDGGRSDKDFLCKILGEAIKAGVTVVTIGDTVGINMPHEYGELVTYLKANTPGIDDVVVAVHCHNDLGLATANSIAGIRAGARQVEVTINGIGERSGNASLEEVVMALKCRGAYVINGVYTKIDTRQIMATSKMVQEYTGLYVQAHKPIVGANCFVHESGIHQDGILKNRSTYEILSPEDIGIVKSQNSGLVLGKLSGRHAVKDRLKELGYELDDEKLNAVFSLFRDLTKNKKRITDADLKALVTSSDEISLEKLNGANGLKSNGYIPVPQVSSNV

SEQ ID NO: 610 - protein, 506 aa, Arabidopsis thaliana
MASSLLTSSGMIPTTGSTVVGRSVLPFQSSLHSLRLTHSYKNPTLFISCCSSVSKNAATSSTDLKPVVERWPEYIPNKLPDGNYVRVFDTTLRDGEQSPGGSLTPPQKLEIARQLAKLRVDIMEVGFPGSSEEELETIKTIAKTVGNEVDEETGYVPVICAIARCKHRDIEATWEALKYAKRPRILVFTSTSDIHMKYKLKKTQEEVIEMAVSSIRFAKSLGFNDIQFGCEDGGRSDKDFLCKILGEAIKAGVTVVTIGDTVGINMPHEYGELVTYLKANTPGIDDVVVAVHCHNDLGLATANSIAGIRAGARQVEVTINGIGERSGNASLEEVVMALKCRGAYVINGVYTKIDTRQIMATSKMVQEYTGLYVQAHKPIVGANCFVHESGIHQDGILKNRSTYEILSPEDIGIVKSQNSGLVLGKLSGRHAVKDRLKELGYELDDEKLNAVFSLFRDLTKNKKRITDADLKALVTSSDEISLEKLNGANGLKSNGYIPVPQVSSTV

SEQ ID NO: 611 - protein, 506 aa, Arabidopsis thaliana
MASSLLTSSGMIPTTGSTVVGRSVLPFQSSLHSLRLTHSYKNPALFISCCSSVSKNAATSSTDLKPAVERWPEYLPNKLPDENYVRVFDTTLRDGEQAPGGSLTPPQKLEIARQLAKLRVDIMEVGFPGSSEEELETVKTIAKTVGNEVDEETGYVPVICAIARSKHRDIEAAWEAVKYAKRPRILIFTSTSDIHMKYKLKKTQEEVIEMAVSSIRFAKSLGFNDIQLGCEDGGRSDKDFLCKILGEAIKAGVTVVNVADTVGINMPHEYAELVTYLKANTPGIDDVVFSVHCHNDLGLATANSIAGIRAGARQVEVTINGIGERSGNASLEEVVMALKCRGAYVINGVYTRIDTRQIMATSKMVQEYTGLYVQAHKPIVGANCFVHESGIHQDGILKNRSTYEILSPEDIGIVKSQNSGLVLGKLSGRHAVKDRLKELGYELDDEKLNAVFSLFRDLTKNKKRITDADMKALVTSSDGISLEKSNGANGLKSNGYIPVLQVSSNV

SEQ ID NO: 612 - protein, 506 aa, Arabidopsis thaliana
MASSLLTSSGMIPTTGSTVVGRSVLPFQSSLHSLRLTHSYKNPALFISCCSSVSKNAATSSTDLKPVVERWPEYIPNKLPDENYVHVFDTTLRDGEQAPGGSLTPPQKLEIARQLAKLRVDIMEVGFPGSSEEELETVKTIAKTVGNEVDEETGYVPVICAIARSKHRDIEAAWEAVKYAKRPRILIFTSTSDIHMKYKLKKTQEEVIEMAVSSIRFAKSLGFNDIQLGCEDGGRSDKDFLCKILGEAIKAGVTVVNVADTVGINMPHEYAELVTYLKANTPGIDDVVFSVHCHNDLGLATANSIAGIRAGARQVEVTINGIGERSGNASLEEVVMALKCRGAYVINGVYTRIDTRQIMATSKMVQEYTGLYVQAHKPIVGANCFVHESGIHQDGILKNRSTYEILSPEDIGIVKSQNSGLVLGKLSGRHAVKDRLKELGYELDDEKLNVVFSLFRDLTKNKKRITDADLKALVTSSDEISLEKLNGANGLKSNGYIPVLQVSSNV

SEQ ID NO: 613 - protein, 506 aa, Arabidopsis thaliana
MASSLLTSSGMIPTTGSTVVGRSVLPFQSSLHSLRLTHSYKNPALFISCCSSVSKNAATSSTDLKPAVERWPEYLPNKLPDENYVRVFDTTLRDGEQAPGGSLTPPQKQEIARQLAKLRVDIMEVGFPGSSEEELETVKTIAKTVGNEVDEETGYVPVICAIARSKHRDIEAAWEAVKYAKRPRILIFTSTSDIHMKYKLKKTQEEVIEMAVSSIRFAKSLGFNDIQLGCEDGGRSDKDFLCKILGEAIKAGVTVVNVADTVGINMPHEYAELVTYLKANTPGIDDVVFSVHCHNDLGLATANSIAGIRAGARQVEVTINGIGERSGNASLEEVVMALKCRGAYVINGVYTRIDTRQIMATSKMVQEYTGLYVQAHKPIVGANCFVHESGIHQDGILKNRSTYEILSPEDIGIVKSQNSGLVLGKLSGRHAVKDRLKELGYELDDEKLNAVFSLFRDLTKNKKRITDADMKALVTSSDGISLEKSNGANGLKSNGYIPVLQVSSNV

SEQ ID NO: 614 - protein, 503 aa, Arabidopsis thaliana
MASLLLTSSSMITTSCPSMVLRSGLPIGSSFPSLRLTRPYDKATLSVSCCSAESKKVATSATDLKPIMERRPEYIPNKLPHKNYVRVLDTTLRDGEQSPGAALTPPQKLEIARQLAKLRVDIMEVGFPVSSEEEFEAIKTIAKTVGNEVDEETGYVPVICGIARCKKRDIEATWEALKYAKRPRVMLFTSTSEIHMKYKLKKTKEEVIEMAVNSVKYAKSLGFKDIQFGCEDGGRTEKDFICKILGESIKAGATTVGFADTVGINMPQEFGELVAYVIENTPGADDIVFAIHCHNDLGVATANTISGICAGARQVEVTINGIGERSGNAPLEEVVMALKCRGESLMDGVYTKIDSRQIMATSKMVQEHTGMYVQPHKPIVGDNCFVHESGIHQDGILKNRSTYEILSPEDVGIVKSENSGIVLGKLSGRHAVKDRLKELGYEISDEKFNDIFSRYRELTKDKKRITDADLKALVVNGAEISSEKLNSKGINDLMSSPQISAVV

SEQ ID NO: 615 - protein, 503 aa, Arabidopsis thaliana
MASLLLTSSSMITTSCPSMVLRSGLPIGSSFPSLRLTRPYDKATLFVSCCSAESKKVATSATDLKPIMERRPEYIPNKLPHKNYVRVLDTTLRDGEQSPGAALTPPQKLEIARQLAKLRVDIMEVGFPVSSEEEFEAIKTIAKTVGNEVDEETGYAPVICGIARCKKRDIEATWEALKYAKRPRVMLFTSTSEIHMKYKLKKTKEEVIEMAVNSVKYAKSLGFKDIQFGCEDGGRTEKDFLCKILGESIKAGATTVGFADTVGINMPQEFGELVAYVIENTPGADDIVFAIHCHNDLGVATANTISGICAGARQVEVTINGIGERSGNAPLEEVVMALKCRGESLMDGVYTKIDSRQIMATSKMVQEHTGMYVQPHKPIVGDNCFVHESGIHQDGILKNRSTYEILSPEDVGIVKSENSGIVLGKLSGRHAVKDRLKELGYEISDEKFNDIFSRYRELTKDKKRITDADLKALVVNGAEISSEKLNSKGINDLMSSPQISAVV

SEQ ID NO: 616 - protein, 503 aa, Arabidopsis thaliana
MASLLLTSSIMITTSCPSMVLRSALPIGSSFPSLRLTRPYDKATLLVSCCSAESKKVATSATDLKPIMERRPEYIPNKLPHKNYVRVLDTTLRDGEQSPGAALTPPQKLEIARQLAKLRVDIMEVGFPVSSEEEFEAIKTIAKTVGNEVDEETGYVPVICGIARCKKRDIEATWEALKYAKRPRVMLFTSTSEIHMKYKLKKTKEEVIEMAVNSVKYAKSLGFKDIQFGCEDGGRTEKDFICKILGESIKAGATTVGFADTVGINMPQEFGELVAYVIENTPGADDIVFAIHCHNDLGVATANTISGICAGARQVEVTINGIGERSGNAPLEEVVMALKCRGESLMDGVYTKIDSRQIMATSKMVQEHTGMYVQPHKPIVGDNCFVHESGIHQDGILKNRSTYEILSPEDVGIVKSENSGIVLGKLSGRHAVKDRLKELGYEISDEKFNDIFSRYRELTKDKKRITDADLKALVVNGAEISSEKLNSKGINDLMSSPQISAVV

SEQ ID NO: 617 - protein, 503 aa, Arabidopsis thaliana
MASLLLTSSSMITTSCPSMVLRSGLPIGSSFPSLRLTRPYDKATLFVSCCSAESKKVATSATDLKPIMERRPEYIPNKLPHKNYVRVLDTTLRDGEQSPGAALTPPQKLEIARQLAKLRVDIMEVGFPVSSEEEFEAIKTIAKTVGNEVDEETGYVPVICGIARCKKRDIEATWEALKYAKRPRVMLFTSTSEIHMKYKLKKTKEEVIEMAVNSVKYAKSLGFKDIQFGCEDGGRTEKDFICKILGESIKAGATTVGFADTVGINMPQEFGELVAYVIENTPGADDIVFAIHCHNDLGVATANTISGICAGARQVEVTINGIGERSGNAPLEEVVMALKCRGESLMDGVYTKIDSRQIMATSKMVQEHTGMYVQPHKPIVGDNCFVHESGIHQDGILKNRSTYEILSPEDVGIVKSENSGIVLGKLSGRHAVKDRLKELGYEISDEKFNDIFSRYRELTKDKKRITDADLKALVVNGAEISSEKLNSKGINDLMSSPQISAVV

SEQ ID NO: 618 - protein, 168 aa, Buchnera aphidicola (Tetraneura caerulescens)
MKEKIIIFDTTLRDGEQSLQSSLTVQEKIKIAFSLEKMGIDVIEVGFPVSSPGDFKSTEIISSNIKNSTVCGLARCVEKDIEAAALAMSKSSNFRIHLFLGTSPLHIKSKLKRNFREIVDLAVYSIKKAKKYTDDVEFSCEDAGRTEIDNLCKIVELAIKAGANTINI

SEQ ID NO: 619 - protein, 519 aa, Buchnera aphidicola (Chaitophorus populeti)
MKEKIIIFDTTLRDGEQSLQSSLNTQEKIEIALALEEMNIDIIEAGFPISSPGDFKSVQEICKKIKNSTVCSLARCIDKDIKIAAKAMSQLNHFRIHLFLGTSKLHIESKLKKNFTEIQDMAIRSIKLAKKYTDDIEFSCEDAGRTSIDNLCSIVEILIKNGVKTINIPDTVGYTIPNEFSKIISELFIRVPNIDQAIISVHCHNDLGMAVGNSISAIQSGARQIEGTITGIGERAGNTALEELIMAIKTRKKMLNFFTDIKHQKIYKTSKIISKICYISIPINKANIGANAFAHSSGFPQDGIIKNRKNYEIFSPKSLDNQNKFNFTSRSGRTAVKNRMPEMGYTEKDYNLKKLYKKFLELADKKGQILDYDLQTLAFIKNHSKKTLNLILKNIFFHLNLQIKQIFTLNYGVKIYFIKLKFIPKMEYFRGYINLYKKLLKLIFYLKKFKIKSIHKKKKIWGKVYIIAKYQNETFYGKNTSQDIVTAIIQSMINILNNILQYKKIKKKNQKSLIKNLLR

SEQ ID NO: 620 - protein, 308 aa, Ceratopteris richardii
  misc_feature (1)..(1): Xaa can be any naturally occurring amino acid
  misc_feature (85)..(85): Xaa can be any naturally occurring amino acid
  unsure (1)..(308): unsure at all Xaa locations
XQITDNRKHILLGVQTLRAMATAAFRTSSSPNVELSIFGCISNSISSSGNGMDNRTANRSEPSENLNLLLSSSGPKPLIESTLKXPPKQLNLLPVRSPCQKPAEGYSRWNAISDAHVNSKGIDMNQIPCSSESEDEDEAEAPSLKLRFLAGEGKRSEMAALGSGMADPGERERGLLEVSSRNSDEEESGSARKKLRLSKEQSALLEESFKEHSTLNPKQKSLLAKQLNLRPRQVEVWFQNRRARTKLKQTEVDCELLKRCCESLTEENRRLQKEVAELRALKGGSPLCYIPRLLHAFACSHINNVPLL

SEQ ID NO: 621 - protein, 212 aa, Ceratopteris richardii
YGKPVDSFWSFTGGQSTVKREREKVGSETENTHNSASYPLCEVGSRGSDEEEGNSTRKKLRLSKEQSALLEESFKEYNTLNSKQKSALAKQLNLRPRQVEVWFQNRRARTKLKQTEVDCELLKRCCESLTEENRRLQKEVQELRALKVTAPRVIAHDYYTPIPAATLAMCPSCERLATIEPPPRPSSKQHVSAIPFASLAFNQHHPEPSAAC

SEQ ID NO: 622 - protein, 214 aa, Ceratopteris richardii
SKAYTQRERLSTTESFPLSMKRDREKMDFETNTSNFNITNNLCEVSSRASDEEDGASTRKKLRLTKEQSAFLEESFKEHSTFNPKQKSALAKQLNFRPRQVEVWFQNRRARTKLKQTEVDCELLKRCCESLTEENRRLQKEVQELRALKMGAPCVVAHDFYMPLPAATLAMCPSCERLSTLDPSSRPPPKQHMSSAPLVSLAFNSHHPQPSAAC

SEQ ID NO: 623 - protein, 527 aa, Pirellula sp.
MNQSAEAPSSENVATRQIRIFDTTLRDGEQSPGASMNLAEKLEVASALVDLGVDIIEAGFPIASPGDFESVRQIATTIRGATICGLARCAEKDIDRAWEALKTAPQARIHVFLATSAIHREFKLRMTPDEIVERAVAGVRRAASHCDDVEFSPEDACRTEHDFLCRVVEAAIDAGATTINVPDTVGYTTPGEIYDRFKMLRDRVPNMDKAVLSTHCHDDLGMAVANSLAAVDAGAGQIECTINGIGERAGNAALEELVMAMKTRQDFYHCQTNINSKRLVPVSRLVSKTTGINVQRNKAIVGRNAFAHESGIHQDGMLKERTTYEIMSPEEVGFTKTDLVLGKHSGRAALADRAKQLGMTLTGEQLQEVFEAFKELADKKKEIYDGDIVALVQQKISETVAPEWTLVDYEVTSGKNQTPNVRVTLRRDEQDITEQVAQGDGPIDAAFWAVEKITGIQVVCKDFRVRSATLGRDAIGEVNLEVEHEGKTYRGTGVSTDSVESTILAMLNAINRIVAGIASDPGELPQP

SEQ ID NO: 624 - protein, 501 aa, Leptospira interrogans
MDLKDYVRIFDTTLRDGEQCPGAAMTENEKLEIASQLATMKVDIIEAGFPVSSPVQFQAVERIARETEGPMIAALARAMKADIEAASKALQPAKKRRIHTFIASSPIHMKYKLGKEPKEVLKMAVEAVTLCRQFVDDVEFSPEDATRSEPEFLRELCEAVIAAGATTINIPDTVGYTTPAEYGGLFKFLLSNVRGAEKIIFSAHCHNDLGLATANSLAAVQNGARQIECTINGIGERAGNTAMEEVVMAMRTRKDTFGIQTQIKTEEIARASYLVKTITGMLVQPNKAIVGANAFAHESGIHQDGVIKHRETYEIMKPETVGLSSNRMVLGRHSGRAGFKDRIVKLGFSPQVEELEAAYQRFLEIADRKKEIYDEDIRALFSEEARKSTGDRFQLEGFTVSTGTKSTPTAGVRILIDGHVREESATGDGPVDAIYKAIQKTTGMDPEVSRLVISPVTEGQDAMAEASVTLEYKGDRVVGKGSSTDIIEACSRAYISALNRL

SEQ ID NO: 625 - protein, 524 aa, Rhodopseudomonas palustris CGA009
MTTTTQSEQDRVIIFDTTLRDGEQCPGATMTFEEKLNVARMLDDMGVDVIEAGYPFASDGDFEAVHEIAKRSKNSVICGLSRAAHKDIDRCAEAIKPAERGRIHTFLSTSPVHMKYKLQMEAAQVYEMVISSVTRARNHTDDVEWSAEDATRTEFDFLCRCIEAAIKAGATTINLPDTVGYAVPEEYRELFRKVRETVPNSDKARFSVHCHNDLGMAVANSMAGVAGGARQIECTINGIGERAGNAALEEVVMAMRVRQDRLPYWNRIETTMLTHASKTVSAATSFPVQYNKAIVGRNAFAHESGIHQDGMIKNAQTYEIMTPETVGVKGTSLVMGKHSGRAGLIHKMEELGYKLSRNQIEDVFVRFKALADRKKDVYDEDIEALVDEQLLHGQDQIKLMSLTVIAGTHGPQRATMKLDVDGQIRIEEAEGNGPVDAVFNCIKALVPHDAKLELYQVHAVTEGTDAQAEVSVRLSHEGRSMTARAADPDTLVASAKAYLGALNKIVAKRQRSVREDAPAVAVAG

SEQ ID NO: 626 - protein, 485 aa, Magnaporthe grisea 70-15
MCPSCEPEQAAASNGNANGNGASNGNGNHDGMTGIETRQAQNARYQPSRNPYQPVGDFLSNVNNFKIIESTLREGEQFANAFFDTAKKIEIAKALDDFGVDYIELTSPAASEQSRLDCAAICKLGLKAKILTHIRCHMDDARIAVETGVDGVDIVIGTSSFLMEHSHGKDMTYITNTAIEVINFVKSKGIEVRFSSEDSFRSNLVDLLSIYSTVDKIGVNRVGIADTVGCASPRQVYDLVKTLRGVVSCDIETHFHNDTGCAISNAFCALEAGATHIDTCVLGIGERNGITPLGGLMARMIVGSKDYVLSKYKLHKLKDIEELVADAVQVNIPFNNYITGFCAFTHKAGIHAKAILKNPSTYEIIDPTLFGITRYVHFASRLTGWNAIKSRASQLNIEMTDEQCKECTAKIKLLADIRPIAIDDADSIIHAFHRSINSGQPIQSLGSLLPNMTEEEKAALADVERRESNDAEQPAAKRAKVEAVA

SEQ ID NO: 627 - protein, 487 aa, Brassica oleracea
MVVRSFLPFGSVRLTRPYNKSSLLISCCSSVSKKAETSGTDLKTVVERWPEYIPNKLPDKNYVRVFDTTLRDGEQSPGAALTPPQKIEIARQLAKLRVDIMEVGFPVSSEEEFETIKTIAKTVGNEVDEETGYIPVICVIARSKERDIKAAWESVKYAKRPRIVIFTSTSDIHLKYKLKMTREEVVEMVASSIRFAKSLGFEDIEFGCEDGGRSDKDYICKVFEEAIKAGATTLACPDTVGINMPHEYGKLVRYIKANTPGIDDVIFSAHCHNDLGVATANTIAGICAGARQVEVTINGIGERSGNAPLEEVVMALKCRGAFVMGGVYTRIDTRQIMATSKMVQEYTGLYVQPHKPIVGANCFVHESGIHQDGILKNRSTYEILSPEDVGVVKSQNSGIVLGKLSGRHAVKGRLKELGYEISDEKLNEVFSRFRDLTKQKKRVTDDDLRALVTCGDEIFSSEKLNGTNDNEINRNGYVPSPQISSVV

SEQ ID NO: 628 - protein, 383 aa, Geobacter sulfurreducens PCA
MEHTLKHEVIIDDTTLRDGEQTAGVVFSKKEKIAIARMLDSIGVRELECGIPAMGEDERAAVRALVDLGLSARLITWNRALVADIQASIDCGITAVDISLSVSDQMIAHKLRKDRRWVKEQLRHSLGFAKEKGLYVSVGGEDSSRADLLFLVELMEVARDMGADRFRFCDTLGILDPFTMYEKVRTLRTAVPELDIEVHTHNDLGMATANAIAGIKAGARFVNTTVNGLGERAGNAALEEVVMALKLACGCDPGIDTQRFHEISRFVGRASQRPVPPWKAVVGERVFSHESGLHADGVIKNPLNYEGFDPAEVGLRRHIVVGKHSGTSGLVERFRSMGVELAREEAAELMDEVRAVAQRLKRPLSDGDLRRLYAAGKHDRLAA

SEQ ID NO: 629 - protein, 512 aa, Geobacter sulfurreducens PCA
MAEQKTIKIFDTTLRDGEQSPGNSMNIEEKLRVAKQLQKLNVDVIEAGFPIASEGDFEAVMRVAQTIKGPEIAGLCRANDKDIDRAWEALKYAGEKGRIHTFIATSDIHMKHKLKMSPSQVMDAAVKAVKRAKSYTPNVEFSCEDAVRTNLKFMAEVVEAVIDAGVTTVNIPDTVGYTIPFEYFNIIKYLKENVPNIEKAVISVHCHNDLGLAVANSIAAVQAGAGQVECTINGIGERAGNCSLEEFVMAIRTRHDILPFKTNVATDQIVPASRLLSTITGIGVQPNKAVVGANAFAHESGIHQHGVLMEKSTYEIMTPESVGLRANVLVLGKHSGRHAFKKRLTELGYELSDEDLNKAFERFKALADMKKEVFDEDLDAIVADEVMRPSEKYRLAHITVTCGSFAVATATVQMEIDGVAVRTAELGDGPVDATLKAIKKLTKTKARLQQYNVGSITGGTDAQGEVTVRLVDGDETVVGRGSSTDIIEASAKAYINALNRLHFRKERAPESL

SEQ ID NO: 630 - protein, 513 aa, Lactococcus lactis subsp. lactis
MRKIEFFDTSLRDGEQTPGVSFSISEKVTIAKQLEKWRISVIEAGFSAASPDSFEAVKQIADSLNDTAVTALARCVISDIDKAVEAVKGAKYPQIHVFIATSPIHMKYKLKISPEEVLKNIDKCVRYARERVEVVEFSPEDATRTELNFLLEAVQTAVDAGATYINIPDTVGYTTPEEYGKIFKFLIDNTKSDREIIFSPHCHDDLGMAVANSLAAIKAGAGRVEGTVNGIGERAGNAALEEIAVALHIRKDFYQAQSPLKLSETAATAELISQFSGIAIPKNKAIVGANAFAHESGIHQDGVLKNAETYEIITPELVGIKHNSLPLGKLSGRHAFSEKLTELNIAYDDESLAILFEKFKKLADKKKEITDADIHALFTGETVKNLAGFILDNVQIDGHKALVQLKNQEEEIYVSQGEGSGSVDAIFKAIDKVFNHQLKLISYSVDAVTDGIDAQATTLVSVENLSTGTIFNAKGVDYDVLKGSAIAYMNANVLVQKENLQGKVEQISAHDGI

SEQ ID NO: 631 - protein, 478 aa, Thermoproteus tenax
MGRFSRHEFGESIKILDSTLREGEQTPGVIFSEEWRIKIAKSLSDVGVHLIEVGDPNVAPDVRSAISKIIALKRDGEIKSEIVVHSRSVKSDIENATSLEPDRVAIFYGVSDIHLKHKHRKTREEALAIIAEHVEFARGAGVKVRFTAEDATRADLDYLIQVVKTARDAGADRVSIADTVGILTPDRARQLFSKLKEAVPGVGLDIHAHNDLGMAVANSMAATEGGADVVHTTVNGLGERAGITPLQVFVAAYYYHKGVKLIDMAKLPYLASLVEAASGIAQMPTFPITGDNVFTHKAGVHQAGVLANPETYEPFPPEVVGRSRDFSLDKYSGRRAVAHRLERLGVKVDEETLAKVVEELKSTNARRLRDEDLLEILEKVTGVRYKAYVNKHIEAFIWIKVDENVYTTSVARRVSTISGVVNVGEVTGDFDIVARVVASNAEELNRIIEDIRSVRGVKSTLTNIVLKQLGSLQAPSAP

SEQ ID NO: 632 - protein, 242 aa, Corylus avellana
MEFQNQSMSVSPQRKLGRGKIEIKRIENTTNRQVTFCKRRNGLLKKAYELSVLCDAEIALIVFSSRGRLYEYANNSSVKTTIERYKKACADSSNSGSVSEANTQFYQQEAAKLRGQIRSVQDSNRHMLGEALSELNFKELKNLEKNLEKGINRIRSKKNELLLAEIEYMHKREVDLHNNNQFLRAKIAENERNQQNLNVMPGGGNYELMQSQSFDSRNYFQVDALQPNHHYPRQDQMALQLV

SEQ ID NO: 633 - protein, 513 aa, Buchnera aphidicola (Cinara tujafilina)
MNKKVLIFDTTLRDGEQALPASLSSKEKLQIALSLERLGVDIIEAGFPISSPGDFKSVELISKNIKNCKICSLARCLPQDIETASQAMKFAVSPRIHVFLGTSSIHIESRLKKSFHEITEMMINAIKKARKYTDDVEFSCEDAGRTSLDDLCFFVEKAIKYGANTINIPDTVGYTLPAQFKNIIEILHKKVPNIHKAIISVHCHNDLGMAVGNSISAIEAGARQIEGTISGLGERAGNAALEEIIMALKIHEKTLGVTTNIKTKEIYRTSKIISQLCHTPIPVNKAIIGKNAFSHSSGIHQDGILKNKKNYEIIDPVDIGLKKSILNLTSRSGRAAVNHRMNEMGYQQKDYDINKLYIDFLKLADKKGQIFDYDLEALAFINNQKEKKIEFFQLKYFDIQSKLSGLSTASVILKCGSKKSIQEVTTKNGPIDAIYQALNKAVLYPIKLKKFNLIAKGEGKDALGQANILIKYKSRNFHGIGLSTDVIEASAKALINVFNHIYQSDLIEKKFNK

SEQ ID NO: 634 - protein, 232 aa, Lilium longiflorum
MGRGKIEIKRIENTTNRQVTFCKRRNGLLKKAYELSVLCDAEVALIVFSSRGRVYEYSNNSIKQTIDRYKKACDSSNSNSLIQVNSQQYFQQESAKLRHQIQILTNANRHLVGEALSSLTVKELKQLENRLERGLTRIRSKKHELLFAEIEFSQKREVELQSDNMYLRAKIAENERTQAAIVQARAEFDALPTFDSRNFYQVNNMLEAPPHYHHQDQTALHLGYEAKDDSVP

SEQ ID NO: 635 - protein, 210 aa, Xenorhabdus nematophila
SRSGRAAVKHRMTEMGYQENDYDLDILYQAFLKLADKKGQVFDYDLEALVFINQQQQEYEHYRLDYFSIQSGTNVVPTATVRLACGDEITSEAATGNGTVDAIYQAIGRITGYPLKLISYQLSGKGHGKDALGQVDIIVECFGRRFHGMGLETDIIESSARAMIHVLNNIWQAEQVEKEKQRISHCNTQGNTPNDIQGNTDSHGNTKETA

SEQ ID NO: 636 - protein, 387 aa, Oryza sativa Japonica Group
MDWNQKSSVLWDWENMPPIGNSANENPKNVMLAESKLAGVGVDIGHESGHSSGGTFSSSSEIGYGSSKSSISASIDSPSKVGNTIELNFASAEEHDKNMDKGKSKVDDTGTSRSPVVAANRVEPLIGLKLGKRTYFEDVCGGQNVKSSPSGVSVATPSPGLAKKVKVAQQNTQNPHCQVEGCNVDLSSAKPYHRKHRVCEPHSKTLKVIVAGLERRFCQQCSRFHGLAEFDQKKRSCRRRLHDHNARRRKPQPEAISLSSSRLSTLLYGDARQQASFLFGQAPYGQMGSCASSWDNPVPGGFKFTATKAPWSRPTIAAGVDGTHVSNQQASGNVLPHGAHHSFDGLMAFKETNAKLIIGVSVKLLDGMELYALRTYGRIISLDKFFP

SEQ ID NO: 637 - protein, 515 aa, Haemophilus influenzae R2866
MTDRVIIFDTTLRDGEQALKASLTVKEKLQIALALERLGVDVMEVGFPVSSQGDFESVQTIARHIKNARVAALSRAVDKDIDAAYEALKVAEAFRIHTFIASSALHVEAKLKRSFDDVVGMAVAAVKRARNYTDDVEFSCEDAGRTGIDNICRIVEAAINAGATTVNIPDTVGFCLPNEYGNIIAQVRNLVPNIDKAVISVHCHNDLGMATANSLTAVQNGARQIECTINGIGERAGNTSLEEVVMAMKVRQDFMGVDTRINTQEIHRVSQMVSQLCNMPIQPNKAIVGSNAFAHSSGIHQDGMLKNKNTYEIMSPETIGLKKEKLNLTARSGRAAVKGHMADMGYNEQDYDLDKLYDAFLKLADKKGQVFDYDLEALAFIDMQQGDEDRLVLDKLSAHSTKEYPATAFVQLKLDGEKLSTSSIGGNGPVDAVYNAILNLTGLEIKMSHYNLTAKGEGAEALGQVDIVVEHKGRKFHGVGLATDIVESSALALVHAINAIYRAHKVADIKNHKQH

SEQ ID NO: 638 - protein, 506 aa, Bacillus cereus ATCC 10987
MKQILFMDTTLRDGEQSPGVNLNEQEKLQIARQLERLGIHVMEAGFAAASEGDFQSVKRIANTIQNATVMSLARAKESDIRRAYEAVKGAVSPRLHVFLATSDIHMKYKLCMSKEDVLDSIHRSVTLGKSLFPTVQFSAEDATRTARDFLAEAVEVAIRAGANVINIPDTVGYTNPEEYYSLFKYLQESVPSYEKAIFSCHCHDDLGMAVANSLAAVEGGALQVEGTINGIGERAGNAALEEVAVALHIRKDFYQAEPSMTLKEIKATSTLVSRLTGMVVPKNKAIVGANAFAHESGIHQDGVLKEVTTYEIIEPELVGESQNLFVLGKHSGRHAFTEKMKELGYEFTTEERDAVFEAFKKLADRKKEITEEDLRALMLGEAAFAAQQYNITQLQVHFVSNSTQCATVVLKDEEGNVFEDAATGSGSIEAIYNAIQRILGLECELADYRIQSITQGQDALAHVHVELKEGTHQVSGFGVAQDVLEASARAYVHAAGKLKSFIQLVK

SEQ ID NO: 639 - protein, 216 aa, Sanguinaria canadensis
IENTTNRQVTFCKRRNGLLKKAYELSVLCDAEVALIVFSNRGRLYEYANNSVKSTIERYKKTCQDPSNSGCAVEANTQFYQQEASKLRQQIGFLQNSNRNLTGEALSSMTVKELKQLETRLEKGISRIRSKKNELLFSEIEYMQKREIDLQNDNMYLRAKIAENERAQQHMNLMPGNEYDVMTSSAYDSRNFLQVNLLESTNHHYSRQEQTALQLG

SEQ ID NO: 640 - protein, 204 aa, Berberis gilgiana
KRRNGLLKKAYELSVLCDAEVALIVFSARGRLYEYANNSVKTTIERYKKACSDSTNTGSVSEANAQFYQQEATRMRQQIGNLQNANRHLLGQDLSSVSVKDLKQMETRLEKGISRIRSKKNELLFAEIEYMQKREIDLQNDNMYLRAKIAENERAQQQMNLMPGNEYETITSAPYDSRNFLQVNLLPESNNQYSRSDQTALQLG

SEQ ID NO: 641 - protein, 216 aa, Helleborus orientalis
IENTTNRQVTFCKHRNGLLKKAYELSVLCDAEVALIVFSSRGRLYEYSNNSVKKTIERYKKASTDSSNSGSASEANAQYYQQEAAKLRNQIAALQNSNRNLLGEQLSNLSIRELKQIEKKIETGINKIRSKKNELLFAEIEYMQKREVDLQNDNMFLRAKISENERTQQHMSLMPGTNNYEVISSGPFDSRNFLQVNLLESNNNYSRSDQTALQLG

SEQ ID NO: 642 - protein, 214 aa, Aquilegia alpina
IENTTNRQVTFCKRRNGLLKKAYELSVLCEAEVALIVFSNRGRLYEYANNSVRKTIDRYKKTCGEGSSTLTVSEANLLFYQQESSKMKQQIEILQNSNRHLMGEALSCLSIKELKQLESRLEKGISRIRSKKNEMLLAEIEFMQKREIELHNDNIYLREQITANERAQQHMNSLPGNVYEAITSAPYNSRDFLQVNLRESKPNQYCDSTALQLC

SEQ ID NO: 643 - protein, 216 aa, Ranunculus ficaria
IENTTNRQVTFCKRRNGLLKKAYELSVLCEAEVALIVFSNRGRLYEYSNNSVKKTIERYKKHSTDSSNTGSVSEANAQFYQQEANKLRNQIATLQNSNKNLLGESLSNLSVRELKAIEKKIEGGIAKIRSKKNELLFAEIEYMQKREIDLQNDNMFLRAKIAENERTQQQHMSLMPVNDYEVISSAPYDSRNFLPVNLLDSNHNYSRNDQTTLQLG

SEQ ID NO: 644 - protein, 380 aa, Klebsiella pneumoniae
MERVLINDTTLRDGEQSPGVAFRTSEKVAIAEALYAAGITAMEVGTPAMGDEEIARIQLVRRQLPDATLMTWCRMNALEIRQSADLGIDWVDISIPASDKLRQYKLREPLAVLLERLAMFIHLAHTLGLKVCIGCEDASRASGQTLRAIAEVAQQCAAARLRYADTVGLLDPFTTAAQISALRDVWSGEIEMHAHNDLGMATANTLAAVSAGATSVNTTVLGLGERAGNAALETVALGLERCLGVETGVHFSALPASCQRVAEAAQRAIDPQQPLVGELVFTHESGVHVAALLRHSESYQSIAPSLMGRSYRLVLGKHSGRQAVNGVFDQMGYHLNAAQINQLLPAIRRFAENWKRSPKDYELVAIYDELCGESALRARG

SEQ ID NO: 645 - protein, 442 aa, Ashbya gossypii ATCC 10895
MSQGNEFHQVTEATTALNNFQQNPYGPNPADYLSNVGSFQLIDSTLREGEQFANAFFSTEKKIEIARALDDFGVDYIELTSPVASEQSLRDCQAICKLGLKAKILTHIRCHMDDAKVAVGTGVDGVDVVIGTSKFLRQYSHGKDMNYIAKSAIEVIEYVKSKGIEIRFSSEDSFRSDLVDLLNIYKTVDKIGVNRVGIADTVGCANPRQVYELVRTLKSVVSCDVECHFHNDTGCAIANAYTALDGGAKLVDVSVLDIGERNEITPLGGLMARMIVAAPDYVKSKYKLHKIRDIENLVAEAVEVNVPFNNPITGFCAFTHKAGIHAKAILANPSTYEILNPNDFGMTRYIHFANRLTGWNAIKSRVDQLNLHLTDDQVKEVTAKIKQFGTSRPLNIDDVDSIIKAFHAQIATPRVTARPANREEEINGFDLEAPPQKKTKIL

SEQ ID NO: 646 - protein, 386 aa, Methanococcus maripaludis S2
MDWKAVSPYNPKLDLKDCYLYDTTLRDGEQTPGVCFAGDQKLEIAKKLDELKIKQIEAGFPIVSENERKAIKSITGEGLNAQILALSRVLKEDIDKAIECDVDGIITFIATSPMHLKYKLHKNLDEVEEMGMKAVEYAKDHGLFVAFSAEDATRTPLEDIIRIHKNAEEHGADRVHIADTLGCATPQAMYHICSELSKHLKKAHIGVHCHNDFGFAVINSIYGLIGGAKAVSTTVNGIGERAGNAAIEEIAMALKVLYDHDMGLNTEILTEISKLVENYSKIKIPENKPLVGEMVFYHESGIHVDAVLENPLTYEPFLPEKIGQKRKIILGKHSGCRAVAHRLQELGLEASRDELWEIVKKTKETREDGTEISDEVFKNIAEKIIK

SEQ ID NO: 647 - protein, 492 aa, Methanococcus maripaludis S2
MVNIFDTTLRDGEQTPGVSLSPSEKLELAIKLDELGVNIIEAGSAITSKGEREAMKLVTGQNLNAEISSFVRALPVDIDAALSCDVDSVHLVVPTSDIHMTYKLRKSREENLKDAMHAVEYAKDHGLIVELSAEDATRSDVEFLKELFLKGEELKADRICVCDTVGILTPLKAIDLIKTMKNTIKIPVSIHCHNDFGMATANTLSAISAGADQCHVTINGIGERAGNASLEEVVMSLKSLYDIETGIDTEKLHKISRIVSKYMKIPVPANKALVGDNAFAHEAGIHVDGLMKSTETYEPIHPETVGNRRKIILGKHSGKAALKYKLEIMNIGLSHEEFEETYSKIKAFGDLGKYISDVDLKTIINQVRGVELERKVILDEITVVSGNKVSPLASINLKFANDCNIKDNVREAAYGLGPVDAAINAVKKALTGVADIELEDYSVRAMTGGTDALIEVVVHLRKGNEVVEVKKAHGDVVMASVEAMMDGINLLI

SEQ ID NO: 648 - protein, 514 aa, Methanococcus maripaludis S2
MESYLNSNEIIKNSLKSMKLPEKVRVFDTTLRDGEQTPGVSLMPDQKMDIAKNLSEIGVDAIEAGFPVSSEGEQESIKNITSLGLDAEICGLARAVKKDIDVAIDCGVDSIHTFIATSPLHREYKLKMSKEKIIDIAVESIEYIKEHGVIVEFSAEDATRTELDYLKEVYKKAVEAGADRINVPDTVGVMVPNSMSYLIKELKNDIKVPISVHCHNDFGIAVSNSVAAVEAGAEQVHCTVNGLGERAGNASLEETVMTLNMVYGINTNVNTKMLTKLSKLVSHYTGIKTQPNKAIVGENSFAHESGIHAHGVLANALTYEPIDPEIVGNRRRIVLGKHSGAHAIKSKLSEIGVEVGEIVSEEQFCEIVERVKAIGDKGKIVTDADVMAIAEDITKRTLKSERIVDLEQFAVITGNHVLPTASVALKVKDKIYKTSELGVGPVDAALKAIQAAVGENIRLNEYNISAISGGTDAIAEVTVRLENQEKEVIAKATGDDVVKASVEAVIDGINKLMG

SEQ ID NO: 649 - protein, 520 aa, Yersinia pestis biovar Microtus str. 91001
MSQQVIIFDTTLRDGEQALQASLSVKEKLQIALALERMGVDIMEVGFPVSSPGDFESVRTIAQQVKNSRVCALARCVDKDIDVAAEALRIAEAFRIHVFLATSTLHIESKLKRSFDDVLAMAVHSVKRARNYTDDVEFSCEDAGRTPIDNLCRVVEAAITAGATTINIPDTVGYTTPYQFGGIITDLYERVPNIDKAIISVHCHDDLGMSVANSITAVQAGARQVEGTINGLGERAGNCSLEEVIMAIKVRHEMLGVHTNINHQEIYRTSQLVSKICNMPIPGNKAIVGSNAFAHSSGIHQDGVLKNRENYEIMTPESIGLKEVQLNLTSRSGRAAVKHRMEEMGYQDKDYNLDSLYDAFLKLADKKGQVFDYDLEALAFINKQQEEPEYYRLDYFSVQSGSSVMATASVKLVCGEEIKSEAATGNGPVDAVYQAINRITDYPIELVKYQLSAKGQGKDALGQVDIVVDHKGRRFHGVGLATDIVESSAKALVHVLNNIWRAHQVEKEKQRLQQNNQEMV

SEQ ID NO: 650 - protein, 127 aa, Arabidopsis lyrata subsp. lyrata
TEKDFLCKILGEMIKAGATTVGFADTVGINMPPEFGELVAYVKENTPGADDIVLAIHCHNDLGVATANTISICAGARQVEVTINGIGERSGNAPLEVVMALKCRGEYLMNGVYTNIDTRQIMATSKM

SEQ ID NO: 651 - protein, 127 aa, Arabidopsis lyrata subsp. lyrata
TEKDFLCKILGEMIKAGATTVGFADTVGINMPPEFGELVAYVKENTPGADDIVLAIHCHNDLGVATANTISICAGARQVEVTINGIGERSGNAPLEVVMALKCRGEYLMNGIYTNIDTRQIMATSKM

SEQ ID NO: 652 - protein, 127 aa, Arabidopsis lyrata subsp. lyrata
TEKDFLCKILGEMIKAGATTVGFADTVGINMPPEFGELVAYVKENTPGADDIVLTIHCHNDLGVATANTISICAGARQVEVTINGIGERSGNAPLEVVMALKCRGEYLMNGVYTNIDTRQIMATSKM

SEQ ID NO: 653 - protein, 127 aa, Arabidopsis lyrata subsp. lyrata
TEKDFLCKILGEMIKAGATTVGFADTVGINMPPEFGELVAYVKENTPGADDIVFTIHCHNDLGVATANTISICAGARQVEVTINGIGERSGNAPLEVVMALKCRGEYLMNGVYTNIDTRQIMATSKM

SEQ ID NO: 654 - protein, 127 aa, Arabidopsis lyrata subsp. petraea
TEKDFLCKILGEMIKAGATTVGFADTVGINMPSEFGELVAYVKENTPGADDIVLTIHCHNDLGVATANTISICAGARQVEVTINGIGERSGNAPLEVVMALKCRGEYLMNGVYTNIDTRQIMATSKM

SEQ ID NO: 655 - protein, 127 aa, Arabidopsis lyrata subsp. petraea
TEKDFLCKILGEMIKEGATTVGFADTVGINMPPEFGELVAYVKENTPGADDIVLTIHCHNDLGVATANTISICAGARQVEVTINGIGERSGNAPLEVVMALKCRGEYLMDGVYTNIDTRQIMATSKM

SEQ ID NO: 656 - protein, 127 aa, Arabidopsis lyrata subsp. petraea
TEKDFLCKILGEMIKAGATTVGFADTVGINMPREFGELVAYVKENTPGADDIVLTIHCHNDLGVATANTISICAGARQVEVTINGIGERSGNAPLEVVMALKCRGEYLMNGVYTNIDTRQIMATSKM

SEQ ID NO: 657 - protein, 127 aa, Arabidopsis halleri
TEKDFLCKILGETIKAGATTVGFADTVGINMPPEFGELVAYVKENTPGADDIVVAIHCHNDLGVATANTISICGGARQVEVTINGIGERSGNAPLEVVMALKCRGEYLMDGVYTNIDTRQIMATSKM

SEQ ID NO: 658 - protein, 127 aa, Arabidopsis halleri
TEKDFLCKILGETIKAGATTVGFADTVGINMPPEFGELVAYVKENTPGADDIVVAIHCHNDLGVATANTISICGGARQVEVTINGIGERSGNAPLEVVMALKCRGEYLMDGVYTKIDTRQIMATSKM

SEQ ID NO: 659 - protein, 127 aa, Arabidopsis halleri
TEKDFLCKILGETIKAGATTVGFADTVGINMPPEFGELVAYVKENTPGADDIVVTIHCHNDLGVATANTISICAGARQVEVTINGIGERSGNAPLEVVMALKCRGEYLMDGVYTKIDTRQIMATSKM

SEQ ID NO: 660 - protein, 127 aa, Arabidopsis thaliana
TEKDFICKILGESIKAGATTVGFADTVGINMPQEFGELVAYVIENTPGADDIVFAIHCHNDLGVATANTISICAGARQVEVTINGIGERSGNAPLEVVMALKCRGESLMDGVYTKIDSRQIMATSKM

SEQ ID NO: 661 - protein, 428 aa, Leptospira interrogans serovar Copenhageni str. Fiocruz L1-130
MKQDSQSENESIVRDLSVSEDQRNVKFFSDLQTPIPKHLPFFMDVTLRDGNQALRRPWNLEQKETIFKQLLKLGVQGIEVGFASSNNQEFEACKYLSSIAPDNVVISSLSRAVEKEIEVSWKAIRFAPKPRIHIVYPVSAFTIQNVLKITPEKVLDRISQSVAYAKSLVGSKGEVQFSGEHFGDSLENLDFAAEAFQIALNNGADVVNLPNTVERYRPWLFVSMVKAVANLLPEDTRISIHTHNDLGMATATTVESYFAGAVQLETALNGLGERAGNTNTYEVAIALHNCGVEVPLNFSTIYETSRLVSYLSEIPIYEKAPLIGEDVISHRSGIHQDGVAKTRHLQKGAYRAFDAALIGRPEGDRIEFTNQSGKSAVYCILKDAGENITLEEAGRLQPILKKISEDLGRRELTLEEIRIEWNRLLRAI

SEQ ID NO: 662 - protein, 516 aa, Leptospira interrogans serovar Copenhageni str. Fiocruz L1-130
MTKVETRLEILDVTLRDGEQTRGVSFSTSEKLNIAKFLLQKLNVDRVEIASARVSKGELETVQKIMEWAATEQLTERIEILGFVDGNKTVDWIKDSGAKVLNLLTKGSLHHLEKQLGKTPKEFFTDVSFVIEYAIKSGLKINVYLEDWSNGFRNSPDYVKSLVEHLSKEHIERIFLPDTLGVLSPEETFQGVDSLIQKYPDIHFEFHGHNDYDLSVANSLQAIRAGVKGLHASINGLGERAGNTPLEALVTTIHDKSNSKTNINEIAITEASRLVEVFSGKRISANRPIVGEDVFTQTAGVHADGDKKGNLYANPILPERFGRKRSYALGKLAGKASISENVKQLGMVLSDVVLQKVLERVIELGDQNKLVTPEDLPFIIADVSGRTGEKVLTIKSCNIHSGIGIRPHAQIELEYQGKIHKEISEGDGGYDAFMNALTKITNRLGISIPKLIDYEVRIPPGGKTDALVETRITWNKSLDLEEDQTFKTMGVHPDQTVAAVHATEKMLNQILQPWQI

SEQ ID NO: 663 - protein, 594 aa, Gibberella zeae PH-1
MKIAKSQRQDKANKHTTPDANAATAATQTEALSNTDWEYGTLQSNPAKNKGPPNWWFICVLQQQQQQQQQQHTVINSLSAALSNRTNPGHRVRVGQGLCTVLAKFALSLAYDLIVPMLKCVTLYGNFFISPPPFGAQPLAQIHVPKSLPASSARASESPSSSRYPRFPFLSHHIITSKLPIMSNVEVTENGAAPTIHKPHHNAALPYQSVGDFLSNTNNFKIIESTLREGEQFANAYFDTETKIKIAKALSDFGVEYIELTSPLASPQSRKDCEEICKLGLKAKILTHVRCTMEDAKVAVETGVDGVDVVIGTSQYLREHSHGKDMAYIKESAIEVIRYIKSQGKEVRFSSEDSFRSDLVDLLSLYQAVDKEGVHRVGVADTVGCASPRQVYDLVRTLRGVVGCDIECHFHNDTGCAIANAHAALEAGATHIDTSVLGIGERNGITPLGGLLARMIVNSHDYVTSRYKLHKLKEIEDLVAEAVEINVPFNNYITGFCAFTHKAGIHAKAILNQPSTYEIIDPADFGMSRYVHFASRLTGWNAIKSRVEQLGLNMTDDQIKQVTAKIKDLADVRPLAIDDTDSIIRSFHFDLQRS

SEQ ID NO: 664 - protein, 515 aa, Haemophilus influenzae R2846
MTDRVIIFDTTLRDGEQALKASLTVKEKLQIALALERLGVDVMEVGFPVSSQGDFESVQTIARHIKNARVAALSRAVDKDIDAAYQALKVAEAFRIHTFIASSALHVEAKLKRSFDDVVGMAVAAVKRARNYTDDVEFSCEDAGRTGIDNICRIVEAAINAGATTVNIPDTVGFCLPNEYGNIIAQVRNRVPNIDKAVISVHCHNDLGMATANSLTAVQNGARQIECTINGIGERAGNTSLEEVVMAMKVRQDFMGVDTRINTQEIHRVSQMVSQLCNMPIQPNKAIVGSNAFAHSSGIHQDGMLKNKNTYEIMSPETIGLKKEKLNLTARSGRAAVKGHMTDMGYNEQDYDLDKLYDTFLKLADKKGQVFDYDLEALAFIDMQQGDEDRLVLDKLSAHSTKEYPATAFVQLKLDGEKLSTSSIGGNGPVDAVYNAILNLTGLEIKMSHYNLTAKGEGAEALGQVDIVVEHKGRKFHGVGLATDIVESSALALVHAINAIYRAHKVADIKNHKQH

SEQ ID NO: 665 - protein, 401 aa, Gibberella zeae PH-1
MQTANNPISHHTSHTMGEGAASSNSGDNSCGANSVGHHTSHTMGQGASSSSSGANGGGGVAEAQRVDDGITLGASLTDVETYNNDNDNESDDASSLGDSLASLDGTAGSVATSMRSSGSLSNFKIIDTTLREGEQFATAYFTTETKMKIAKALDDIGVEYLELTSPASSPQSKADAQAICKMGLKAKVLVHIRCNMDDARIAVETGVDGINMCIGTSAQLMKHSHGKDLDWIAAKAKEVIEFTQAHGLEVRFSGEDSFRSDFSEILKLYSLMDRLGAHRVGIADTVGGASWREVYDKVSTLRQMIGCDIETHFHNDTGCATSNAYTALEAGATHIDTTVLGIGERNGITPLGKLFQCMLGFGHEYVATKYRLDKLPALEKLVAEAVDIEIPWDTPDLSVFL

SEQ ID NO: 666 - protein, 513 aa, Actinobacillus pleuropneumoniae serovar 1 str. 4074
MSNIIIFDTTLRDGEQSLKASLTVKEKLQIALALERLGVDVMEVGFPVSSAGDFESVKTIAQHIKNSRVCALSRAVDKDIDVAAEALKVAEAFRIHTFIASSAIHVESKLKRSFDDVVEMAVHAVKRARNYTDDVEFSCEDAGRTGIDNICRIVEAAINAGATTVNIPDTVGYCLPYQYGEIIANVMNRVPNIDKAVVSVHCHNDLGMATANSLTAVLNGARQIECTINGIGERAGNTALEEVVMAIKTRQDMFNGRDTRINTQEIHRVSQMVSQLCNMPIQPNKAIVGSNAFAHSSGIHQDGMVKNKNTYEIMSPETIGLKKEKLNLTARSGRAAVKNHMSEMGYQENDYDLDKLYDAFLKLADKKGQVFDYDLEALAFIDMQAGDEGRLHLDVITSQMISHLPASAFVQVELDGEKLSQVSSGGNGPVDAVFNAILAITGMDIKMLHYNLTAKGEGAEALGQVDIVVEHEGRRFHGVGLATDIVESSARALIHVINAIYRAHKVADLKAKK

SEQ ID NO: 667 - protein, 520 aa, Thermus thermophilus HB27
MEKERHIRIFDTTLRDGEQSPGVALSLDQKLEIAQALAQLNVDIIEAGFPVSGPMEFEAVRRIATEVKGPIIAALARTHTLDIDQAAKALEKAEKPRIHVFTSASKVHLQYMLRKTEEEVLEMADRMVRYARRYVDDVEFSAQDVMRADWEFVKRLYEVAIEAGATTINIPDTTGYGTPQEYGALIRRIRDEVVRGRDVIISTHTHDDLGMATANALAGVENGAGQIECTINGIGERAGNCALEEVVMALYVRRDWYKAYTRINTREIYRVSRLVERYTGMPVPPNKAIVGDNAFAHESGIHQDGVIKHRATYEIMDAELIGRRPAVLVLGKHSGRAAFKKALEDLGYKDLSEEEVKKLFARFKEIAEKKGPLSAEELQALVESEREPTSHFFQLEHVQFFSGSGLLPTATVKVKTPDGERVATHTGDGPVDAVYKAIQEAIGLRPELELYRVEAITGSTEALGQVTVRLRLGELQAVGVGVSPDIIEASALAFLDAAGKLASGRATRHPPSIEEVHRGV

SEQ ID NO: 668 - protein, 516 aa, Magnetospirillum magnetotacticum MS-1
MDKNRVIIFDTTLRDGEQSPGASMNLEEKVRIALALEEMGVDVIEAGFPIASNGDFEAVEAVARAVKTSVICGLARATKGDIERCAEAVKPAGRGRIHTFLSTSPLHMKYKLQMEPEKVLEKISESVAYARNLTDDVEWSAEDGSRTEHDFLCTCVEAAIKAGARTINIPDTVGYAIPDEYAALIAMLFNRVPNIDKAIISVHCHNDLGLAVANSLAAVGKGARQIECTINGLGERAGNAAMEEIVMALRTRPDLLPYKSGVKTENITRASRLVSTITGFVVQPNKAIVGKNAFAHESGIHQDGVLKHAQTYEIMTPESVGLNRSSLVMGKHSGRAAFKAKLKDLGYELGDNAVEDAFTRFKDLADRKKDVFDEDIVALVDDAVVRGNDRLKLVSLEVLCGTKHQPPSAELELSVDGVVKSVRATGDGPVDATFNAIKALFPHEVKLQLYQVSAVTQGTDAQAEVTVRLEEDGKSVNGQGRRNRYFGGLGAGLCQRVEQTSGQTAKNRPRCRRSVI

SEQ ID NO: 669 - protein, 509 aa, Desulfovibrio vulgaris subsp. vulgaris str. Hildenborough
MAERIRIFDTTLRDGEQSPGATMNIKEKLRLAHQLQTLGVDIIEAGFPAASPGDFESVRAIAKTVKGMTVAGLCRALPADIDRAWDAVCVAESPRLHTFLATSPVHMQYKLRKTPDEVVRMVDAAVRHAAGHTSNVEFSAEDASRSDRDFLVRVFTTAIEAGATTINIPDTVGYAQPEEFGALVRYVIENTPNAHKAVFSVHCHNDLGLGVANTLAALRAGARQAEVTISGIGERAGNAALEELVMALRTRHDYFGLDTGIVTEQLYPTCRLLSMIIGQPIPANKAIVGANAFAHESGIHQDGMLKHRETYEIMTPESIGRTRTELVLGKHSGRNAVKNKLEELGYRLEEDQLNTVFDAVKQLADKKKQIHDEDVEALVLEEVYRIPDRYRLVNLSVQCSDTGMPPTAAVVMEVDGETMRHAGFGAGPIDAVFNAIAHIVGRTPQLERYSVTAITGGTDAQGEVTVRVRENGGTAVGRGSHPDIIIASARAYLNALNRLVKKEEEKEGI

SEQ ID NO: 670 - protein, 512 aa, Listeria monocytogenes str. 4b F2365
MKKIQFFDTTLRDGEQTPGVNFDVKEKIQIALQLEKLGIDVIEAGFPISSPGDFECVKAIAKAIKHCSVTGLARCVEGDIDRAEEALKDAVSPQIHIFLATSDVHMEYKLKMSRAEVLASIKHHISYARQKFDVVQFSPEDATRSDRAFLIEAVQTAIDAGATVINIPDTVGYTNPTEFGQLFQDLRREIKQFDDIIFASHCHDDLGMATANALAAIENGARRVEGTINGIGERAGNTALEEVAVALHIRKDFYQAETNIVLNQFKNSSDLISRLSGMPVPRNKAVIGGNAYAHESGIHQDGVLKNPDTYEIITPALVGVDKNSLPLGKLSGKHAFNTRMEEMGYTLTEQEQKDAFKRFKQLADAKKEVTEEDLHALILGQSSESADDFELKHLQVQYVTGGVQGAIVRIEERDGALVEDAATGSGSIEAIYNTINRLMKQDIELTDYRIQAITAGQDAQAEVHVVIKNDKGAVFHGIGIDFDVLTASAKAYLQASGKSKTASKQADFEEVK

SEQ ID NO: 671 - protein, 506 aa, Bacillus cereus G9241
MKQILFMDTTLRDGEQSPGVNLNEQEKLQIARQLERLGIHVMEAGFAAASEGDFQSVKRIANTIQNATVMSLARAKESDIRRAYEAVKGAVSPRLHVFLATSDIHMKYKLCMSKEDVLDSIYRSITLGKSLFPTVQFSAEDATRTSRDFLAEAVEVAIRAGANVINIPDTVGYTNPEEYYSLFKYLQESVPSYEKAIFSCHCHDDLGMAVANSLAAVEGGALQVEGTINGIGERAGNAALEEVAVALHIRKDFYQAEPSMTLKEIKATSTLVSRLTGMVVPKNKAIVGANAFAHESGIHQDGVLKEVTTYEIIEPALVGESQNLFVLGKHSGRHAFTEKMKELGYEFTTEERDAVFEAFKKLADRKKEITEEDLRALMLGEAAFAAQQYNITQLQVHFVSNSTQCATVVLKDEEGNVFEDAATGSGSIEAIYNAIQRILGLECELADYRIQSITQGQDALAHVHVELKEGTHQVSGFGVAQDVLEASARAYVHAAGKLKSFIQLVK

SEQ ID NO: 672 - protein, 522 aa, Salmonella enterica subsp. enterica serovar Typhimurium
MSQQVIIFDTTLRDGEQALQASLSAKEKLQIALALERMGVDVMEVGFPVSSPGDFESVQTIARTIKNSRVCALARCVEKDIDVAAQALKVADAFRIHTFIATSPMHIATKLRRTLDEVIERAVYMVKRARNYTDDVEFSCEDAGRTPVDDLARVVEAAINAGARTINIPDTVGYTMPFEFAGIISGLYERVPNIDKAIISVHTHDDLGIAVGNSLAAVHAGARQVEGAMNGIGERAGNCALEEVIMAIKVRKDIMNVHTNINHHETGAPARPSVQICNIADPSQQSDCRQRRFRHSSGIHQDGVLKNRENYEIMTPESIGSEPDTAEPDLPLWPCRRETSHGRDGLQGHRLQHGPPVRRVPEAGDKKGQVFDYDLEALAFINKQQEEPEHFRLDYFSVQSGSSDIATASVKLACGEEIKAEAANGNGPVDAIYQAINRITGYDVELVKYDLNAKGRARRAGSGRYRREPSWSPLPRRGLATDIVESSAKAMVHVLNNIWRAAEVEKELQRKAQNKENNKETV

SEQ ID NO: 673 - protein, 386 aa, Picrophilus torridus DSM 9790
MGCFGGGYARFFHTGMHSRLGLNSVKKRIRIFDTTLRDGEQSPGVSFNINQKARIAGMLVDLGVDMIETGFAAVSSEESMAIRKIHEMDGNFISLARCNRHDIDSVIDTGIDNIHLFIATSDIHIKYKLKTSRENIMEKIVDSIDYARSHGLNVLFSPEDATRTDMNFLIDVINTAISSGAYEINIPDTIGIMNPISMYNFIHEIKNRTKSCISVHCHNDFGMATANTLAAIMAGADGAQVTVNGIGERAGNAALEEVVLSVHAFTDCSTGINMRMIPKISKYVSMASKMYIQKNKAIVGENAFSHESGIHVHGLINNPETYEPIDPGILGLNRRIVLGKHSGTTSLKYILESHGIKKSDDEISGILVRIKDMNIYDENEILKMVR

SEQ ID NO: 674 - protein, 375 aa, Picrophilus torridus DSM 9790
MIGLLDSTLREGEQTPGVSFSMDARVEIARALSDAGVSMIEAGHPAVSETVLKSIKSIMELKSSGIIRSTIVAHSRAVRSDIDVAASLNIDMIAIFYGISDLHLKYKTLKTREDAIRIIVDSIDYARSYGLNVRFTAEDATRTDYNYLLDVARAARDAGAKRISIADTVGILNPDTSYKLFKMIIKDVKNVEFDIHAHNDLGMAVANSIAAYRAGATIIHSTVNGLGERSGITPTQIIGPALKYHYNEAVIDLKRLYSLSNLVEKYSGVMVPYNYPVTGKNAFTHKSGVHIAGIINKPETYEFMDPCLFGNKRYYTISSYSGRHAVITRLQELGISLNDEHLKILMKMIKNKNRELNDDELYAMAESIKRSAVSM

SEQ ID NO: 675 - protein, 234 aa, Oryza sativa Japonica Group
MDWMPPPKPTSPRSPPLLWDWADAAVPGSSSGEVSAAAAAAAAHPGRRRKEKRGRAEEGGGGGGEVRCQVEGCGVELVGVKDYHRKHRVCEAHSKFPRVVVAGQERRFCQQCSRFHALSEFDQKKRSCRRRLYDHNARRRKPQTDVFSYASARPPSSLLFDDNRQISFVWNKAPLSHVRPFAISPWESSSEVGTTDGHIYLDKSHISKSLPAFNTDIDELLPMKGMIFQRCKFS

SEQ ID NO: 676 - protein, 506 aa, Bacillus thuringiensis serovar konkukian str. 97-27
MKQILFMDTTLRDGEQSPGVNLNEQEKLQIARQLERLGIHVMEAGFAAASEGDFQSVKRIANTIQNATVMSLARAKESDIRRAYEAVKGAVSPRLHVFLATSDIHMKYKLCMSKEDVLDSIHRSVTLGKSLFPTVQFSAEDATRTARDFLAEAIEVAIRAGANVINIPDTVGYTNPEEYYSLFKYLQESVPSYEKAIFSCHCHDDLGMAVANSLAAVEGGALQVEGTINGIGERAGNAALEEVAVALHIRKDFYKAEPSITLKEIKATSTLVSRLTGMVVPKNKAIVGANAFAHESGIHQDGVLKEVTTYEIIEPALVGESQNLFVLGKHSGRHAFTEKMKELGYEFTNDERDAVFEAFKKLADRKKEITEEDLRALMLGEAAFAAQQYNITQLQVHFVSNSTQCATVVLKDEEGNVFEDAATGSGSIEAIYNAIQRILGLECELADYRIQSITQGQDALAHVHVELKEGAHQVSGFGVAQDVLEASARAYVHAAGKLKSFIQLVK

SEQ ID NO: 677 - protein, 509 aa, Staphylococcus aureus subsp. aureus MRSA252
MSSHIQIFDTTLRDGEQTPGVNFTFDERLRIALQLEKWGVDVIEAGFPASSTGSFKSVQAIAQTLTTTAVCGLARCKKSDIDAVYEATKDAAKPVVHVFIATSPIHLEHKLKMSQEDVLASIKEHVTYAKQLFDVVQFSPEDATRTELPFLVKCVQTAVDAGATVINIPDTVGYSYHDEYAHIFKTLTESVTSSNEIIYSAHCHDDLGMAVSNSLAAIEGGARRIEGTVNGIGERAGNAALEEVALALYIRNDHYGAQTALNLEETKKTSDLISRYAGIRVPRNKAIVGQNAFSHESGIHQDGVLKHRETYEIMTPQLVGVSTTELPLGKLSGKHAFSKKLKALGYDIDKEAQIDLFKQFKAIADKKKSVSDRDIHAIIQGSEHEHQALYKLETLQLQYVSSGLQSAVVVIKDKEGHIYQDSSIGTGSIVAIYNAVDRIFQKETELIDYRINSVTEGTDAQAEVHVNLLIEGKTVNGFGIDHDILQASCKAYVEAHAKFAAENVEKVGN

SEQ ID NO: 678 - protein, 118 aa, Citrullus lanatus
  misc_feature (58)..(58): Xaa can be any naturally occurring amino acid
  misc_feature (84)..(84): Xaa can be any naturally occurring amino acid
  misc_feature (89)..(89): Xaa can be any naturally occurring amino acid
  misc_feature (99)..(99): Xaa can be any naturally occurring amino acid
  unsure (1)..(118): unsure at all Xaa locations
DLTPRQVEVWFQNRRARTKLKQTEVDCEYLKRCCENLTEENRRLQKEVQELRALKLSXQLYMHMNPPTTLTMCPQCERVAVSSXSSASXATTTRHPAAXSVQRPSMAINPWAVLPIQR

SEQ ID NO: 679 - protein, 216 aa, Silene latifolia
MRGVASPNSTVSTVSGKRSLCERDSTSAGAADDLDLERASSRGLSDDEDGGDNSRKKLRLTKDQSAILEDSFKEHNTLNPKQKLALAKRLGLGPRQVEVWFQNRRARTKLKQTEVDCEFLKRCCEQLTEENRRLQKEVQELRTLKLSPQFYMQMTPPTTLTMCPSCERVAAPPSGPVQPKPHPSLESRSSIRPVANNPWVTAAVPIRSFDAIHPRS

SEQ ID NO: 680 - protein, 391 aa, Pectobacterium atrosepticum SCRI1043
MADIIINDTTLRDGEQSPGVAFRASEKLAIAEALVDAGVTALEVGTPAMGDDERARIAVIRRRLPDTVLMTWCRMNALEIRQSADLGMNWVDISVPASDRLREQKLRQPLNVLLAQLSSLIAQARQQGLRVCVGCEDASRASDDTLRQIAIAADAAGAERLRFADTLGVLDPFSTFARISTLRQNWGGEIEMHAHNDLGLATANTLAAIEAGVSHVNTTVLGLGERAGNAALETVALALERCLDRDSGIHFARLPALCQLVASAAQRTIDKQQPLVGEQVFTHESGVHVAALLNDSRSYQGIDPALMGREFCLVLGKHSGRQAVAGIFARLGFQPQASETEALLRSVRAFAENWKRNPLDYELLEMYRELCGSDAVMGRANDGMVLPVTRR

SEQ ID NO: 681 - protein, 532 aa, Pectobacterium atrosepticum SCRI1043
MSEQVIIFDTTLRDGEQALQASLSVKEKLQIAFALERMGVDVMEVGFPVSSPGDFESVQTIARNIKNSRVCGLTRCVEKDIDVAAEALRVAEAFRIHTFIATSPMHIATKLRSTLDEVIERAIYMIKRARNYTDDVEFSCEDAGRTPIPDLCRVVEAAINAGARTINIPDTVGYTMPHEFGNIIASLYQHVPNIDKAIISVHTHDDLGLAVGNAMAAVHAGARQVEGTLNGIGERAGNCSLEEVIMAIKTRHDILNVHTNINHQEIYRTSQLVSQICNMPIPANKAVVGANAFAHSSGIHQDGVLKNRENYEIMTPESIGLKEVQLNLTSRSGRAAVKHRMEEMGYQDNDYNLDDLYSAFLKLADKKGQVFDYDLEALAFISRQQEEPEFYHLDYFSVQSGSSVMATASVKLICGEETQSEAATGNGPVDAVYQAINRITGYQVSLVKYQLTAKGQGRDALGQVDIVADYQGRRFHGVGLATDIVESSAQAMVNVLNNIKRAQQVEKEIQRLQQHNNQQQNDSKQQNSQETV

SEQ ID NO: 682 - protein, 431 aa, Candida glabrata CBS 138
MTANNNPYAPSPTDYLSNVNSFQLIDSTLREGEQFANAFFDTEKKIEIAKALDDFGVDYIELTSPVASEQSYKDCKAICNLGLKAKILTHIRCHMDDAKVAVETGVDGVDVVIGTSKFLRQYSHGKDMNYIAKSAIEVIEFVKSKGIEIRFSSEDSFRSDLVDLLNIYKTVDKIGVNRVGIADTVGCANPRQVYELVRTLKSVVSCDIECHFHNDTGCAIANAYTALEGGAKLIDVSVLGIGERNGITPLGGLMARMIVAAPDYVKSKYKLHKIRDIENLVAEAVEVNIPFNNPITGFCAFTHKAGIHAKAILANPSTYEILDPHDFGMKRYIHFANRLTGWNAIKARVDQLNLNLTDDQIKEVTAKIKKLGDVRPLNIDDVDSIIKDFHAEITTPQLRSINGQARTSAIDLQSLDTVEENEPAQKKARVD

SEQ ID NO: 683 - protein, 437 aa, Candida glabrata CBS 138
MDQYQQVTESTPTVETSNPYGPNPADFLSNVKEFQLIDSTLREGEQFANAFFDTEKKIEIAKALDDFGVDYIELTSPVASEQSFRDCKAICNLGLKAKILTHIRCHMDDAKVAVETGVDGVDVVIGTSKFLRQYSHGKDMNYIAKSAIEVIEFVKSKGIEIRFSSEDSFRSDLVDLLNIYKTVDKIGVNRVGIADTVGCANPRQVYELVRTLKSVVSCDIECHFHNDTGCAIANAYTALEGGAKLIDVSVLGIGERNGITPLGGLMARMIVAAPEYVKSKYKLHKIRDIENLVAEAVEVNIPFNNPITGFCAFTHKAGIHAKAILANPSTYEILDPHDFGMKRYIHFANRLTGWNAIKSRVDQLNLNLTDDQVKEVTTKIKKLGDIRPLNIDDVDSIIKDFHADLATPMVRPTEDGADNEEPLQLDEPAKKKSKLSQ

SEQ ID NO: 684 - protein, 393 aa, Kluyveromyces lactis NRRL Y-1140
MSVNSNPYAPSPNDLLSNVCNFQLIESTLREGEQFASAFFSTEKKIEIAKALDDFGVDYIELTSPVASEQSRSDCEAICKLGLKAKILTHIRCHMDDARVAVETGVDGVDVVIGTSKFLREYSHGKDMNYIAKSAIEVIEFVKSKGLEIRFSSEDSFRSDIVDLLNIYKTVDKIGVNRVGIADTVGCANPRQVYELVRTLKSVVSCDIECHFHDDTGCAIGNSYSALEAGARLIDVSVLGIGERNGITSLGGLMARMIVSAPEYVKSKYKLHKLRDLENLVADAVSVNVPFNNPITGFCAFTHKAGIHAKAILANPSTYEILNPEDFGMKRYIHFANRLTGWNAIKSRVEQLNLHLSDDQIKEVTSKIKQIGDVRQLSIEDVDTIIKDYHSEL

SEQ ID NO: 685 - protein, 441 aa, Kluyveromyces lactis NRRL Y-1140
MSSNQDFQPVTESASSVTKFQQNPYGPNPADYLSNVNNYQLIDSTLREGEQFANAFFDTEKKIEIAKALDDFGVDYIELTSPVASEQSRRDCEAICKLGLKAKILTHIRCHMDDARVAVETGVDGVDVVIGTSKFLRQYSHGKDMNYIAKSAIEVIEFVKSKGIEIRFSSEDSFRSDLVDLLNIYKTVDKIGVNRVGIADTVGCANPRQVYELVRTLKSVVSCDIECHFHNDTGCAIANAYTALEGGARLIDVAVLGIGERNGITPLGGLMARMIVAAPEYTKSKYKLHKIRDIENLIAEAVEVNIPFNNPITGFCAFTHKAGIHAKAILANPSTYEILDPHDFGMKRYIHFANRLTGWNAIKSRVDQLNLNLTDDQVKEVTAKIKKLGDIRPLNIDDVDSIIKDFHAEVSTPQLRAVRRDDNDVNDIDIQEPSNKKTKVE

SEQ ID NO: 686 - protein, 219 aa, Prunus armeniaca
MEKTECSEAENFGSVTTSLEPQATAKRKKAKSKNQRRFSDEQIRLLESIFEADSKLEPRRKVQVARELGLQPRQVAIWFQNRRARWKSKQIEQDFRTLRADYDNLASRFESLKEEKQSLLMQMQKLNELVGKPSQGLEGNIMVDGSRLQEELEPRGVIQSHKNNTSNDVGCHGDEIHELLSMAHVDASSLSPQDWHRFEPSILFDPSRFTSSHWLNFWT

SEQ ID NO: 687 - protein, 439 aa, Debaryomyces hansenii CBS767
MSAPEGFKKVSEDAHKSNQEINSNPYGPNPADFLSNVSNFQLIESTLREGEQFANAFFSTEKKIEIAKALDEFGVDYIELTSPVASEQSRKDCEAICKLGLKAKILTHIRCHMDDARVAVETGVDGVDVVIGTSQFLRQFSHGKDMNYIAESAVEVIEFVKSKGIEIRFSSEDSFRSDLVDLLNIYKTVDKIGVNRVGIADTVGCANPRQVYELVRTLRSVVHCDIECHFHNDTGCAIANAYTALEGGARLIDVSVLGIGERNGITPLGGLMARMVAADRDYVLSKYKLHKLRDLENLVAEAVQVNIPFNNPITGFCAFTHKAGIHAKAILANPSTYEILSPADFGLTRYIHFANRLTGWNAIKSRVDQLNLQLSDEQCKEVTNKIKKLGDVRQLTIDDVDSIIKDFHADVATPHVRPTEPVPHVIEGLEESDVKRSKN

SEQ ID NO: 688 - protein, 420 aa, Debaryomyces hansenii CBS767
MSIQSNPYGPNPSDFLSNVNKFEVIESTLREGEQFANAFFSTEKKIEIAKALDDFGVDYIELTSPVASEQSRSDCEAICKLGLKAKILTHIRCHMDDARVAVETGVDGVDVVIGTSQFLRQYSHGKDMNYIAQSAIEVIEFVKSKGIEIRFSSEDSFRSDIVDLLNIYRTVDKIGVNRVGIADTVGCANPRQVYELVKTLKSVVSCDIECHFHNDTGCAIANAYTALEAGAKLIDVSVLGIGERNGITPLGALMARMITADRDYVLSKYKLHKLRDLENLVADAVQVNVPFNNPITGFCAFTHKAGIHAKAILANPSTYEILNPSDFGLTRYIHFANRLTGWNAIKSRVDQLNLHLTDDQCKEVTTKIKIMGDVRQLNIDDVDSIIKDFHADLSTPLLKPQAEGDKDVTEEPVSKKQKSG

SEQ ID NO: 689 - protein, 446 aa, Yarrowia lipolytica CLIB122
MCATDNAPAANAAPEKPSNVGVEVGHTGEQTNPYGANPADFLSNVSKFQLIESTLREGEQFASAFFDTETKIEIAKALDDFGVDYIELTSPAASEQSRSDCEAICKLGLKAKILTHIRCHMDDARLAVSTGVDGVDVVIGTSQFLRQYSHGKDMNYIAQSAVEVIEFVKSHGIEIRFSSEDSFRSDLVDLLNIYRTVDKIGVNRVGIADTVGCANPRQVYELVRTLKSVVSCDIECHFHNDTGCAIANAYTALEAGANLIDVSVLGIGERNGITSLGGLMARMIAADRDYVLSKYKLHKLRDLENLVADAVQVNIPFNNPITGFCAFTHKAGIHAKAILANPSTYEILNPADFGLTRYIHFANRLTGWNAIKSRVDQLNLHLTDAQCKDVTAKIKKLGDVRSLNIDDVDSIIREFHADVTSTPTVAATEGPAVEDEPAAKKAKTEE

SEQ ID NO: 690 - protein, 440 aa, Saccharomyces cerevisiae
MSENNEFQSVTESTTAPTTSNPYGPNPADYLSNVKNFQLIDSTLREGEQFANAFFDTEKKIEIARALDDFGVDYIELTSPVASEQSRKDCEAICKLGLKAKILTHIRCHMDDARVAVETGVDGVDVVIGTSKFLRQYSHGKDMNYIAKSAVEVIEFVKSKGIEIRFSSEDSFRSDLVDLLNIYKTVDKIGVNRVGIADAVGCANPRQVYELIRTLKSVVSCDIECHFHNDTGCAIANAYTALEGGARLIDVSVLGIGERNGITPLGGLMARMIVAAPDYVRSKYKLHKIRDIENLVADAVEVNIPFNNPITGFCAFTHKAGIHAKAILANPSTYEILDPHDFGMKRYIHFANRLTGWNAIKSRVDQLNLNLTDDQIKEVTAKIKKLGDVRPLNIDDVDSIIKDFHAELSTPLLKPVNKGTDDDNIDISNGHVSKKAKVTK

SEQ ID NO: 691 - protein, 262 aa, Gentiana triflora
MGRGRVQLRRIENKISRQVTFSKRRNGLLKKAHEISVLCDAEVALIVFSSKGKLFEYSTDSSMESILERYERYSYDEKRINGTESQAKDNWSMEYPKLVSRIELLQKNIRHYEGEDLNPLNMRELQSLEQQLDTALKKIRTRKSQLMHDSVSELQKKEKALQEQNNLLAKKLKENEKNITQQRMQSADQHRLVDVSNHPPPPSPPPLFPQSLSIQPPLQQPGIHFQTSETIGSDGGDGNQNGTEAAAGTNTHMPPWMVRHLN

SEQ ID NO: 692 - protein, 252 aa, Gentiana triflora
MDSQNQEIESSNSRKSGRGKIEIKRIENKTNRQVTFCKRRSGLLKKAYELSVLCDAEVALIVFSSSGRLYEYANNSAKGTIERYKKACGDSTSAGSVSEANIQFYQQEANQLRKNIRDIQSSNRHILGEGLDELSFKQIKNLEGRVEKGIARVRSRKNELLAAEIELMKKREIELQNANLYLRAKQITENDQQRVQAEQQQMNFMPASDYQTNNNNIASEPNYQEVHNFIPVNFLDHNQHYSSQDPTALQFV

SEQ ID NO: 693 - protein, 523 aa, Symbiobacterium thermophilum IAM 14863
MTRRIRIFDTTLRDGEQAPGFGMTAEAKLEVARQLSKLGVDVIEAGFPAASPGDFEAVRTIAETITGPTIAGLARANEDDIRRCYEAVKGAQKPRIHTFIATSPIHMEYKLRKKPEEVVRAAREAVALARSLGPEVEFSAEDATRSDWNFLVQIFTVAARAGATILNVPDTVGYTTPKEYYDLIRYLIEHVDAPEGVQFSVHCHNDLGLAVANTLAAIEAGATQVECTINGIGERAGNAALEEIVMALRVRRDQWGATTAINTREIYRTSRLLQSVTGIQVQPNKAIVGANAFAHESGIHQDGMLKHRDTYEIMKPEDVGVPESSLVLGKHSGRAAFRARLEHLGYQLTDAEIDSAFRRFKELADRKRTITDHDLMAIVGDEQAHRTVTEVCRLESFQVVAGNERIATASVRLVREGEVVQEAASGDGPISALYHAIDRAARFEGQLLDYRLNAVTEGEDALGEVTVRVRAGDRVASGRGTSTDVIEASARAYMNAMNKILSGAALAVSDDPAPGWQMRAYGD

SEQ ID NO: 694 - protein, 518 aa, Bacillus licheniformis ATCC 14580
MRKINFFDTTLRDGEQSPGVNLNTQEKLAIAQQLEKLGVNIMEAGFPASSPGDFNAVKEIARTIKNCSVTGLARSVKGDIDSAWEALKDGAEPRLHIFIATSDIHLKYKLKKTREQVLEQAVAMVKYAKERFPIVQWSAEDACRTDLPFLAEIVSEVIAAGADVVNLPDTVGYLAPAEYGNIFRYIKENARNADKVQLSAHCHDDLGMAVANSLAAIENGADQVESVINGIGERAGNASLEEIAVALHIRKDFYQAESTIQLNEIKRTSDLVSKLTGMAVPRNKAVVGDNAFAHESGIHQDGFLKEKTTYEIISPELVGVKTDALVLGKHSGRHAFKDKLQNLGFQLGEEEINKFFNIFKELTGKKKEFTDEDLISLILEEKTADRKIGYDFISLQVHYGTSQVPTATVSLKDQETDQVIQEAATGAGSVEAVYNTLKRCMDKEVQLLDYRIQSNRKGQDAFAQVYVRVMIDGKESGGRGVAQDVLEASAKAYLNAVNRYLVLKTNTEGLSKQAAVGS

SEQ ID NO: 695 - protein, 506 aa, Bacillus cereus E33L
MKKILFMDTTLRDGEQSPGVNLNEQEKLQIARQLERLGIHVMEAGFAAASEGDFQSVKRIANTIQNATVMSLARAKESDIRRAYEAVKGAVSPRLHVFLATSDIHMKYKLCMSKEDVLDSIYRSVTLGKSLFPTVQFSAEDATRTARDFLAEAVEVAIRAGANVINIPDTVGYTNPEEYYSLFKYLQESVPSYEKAIFSCHCHDDLGMAVANSLAAVEGGALQVEGTINGIGERAGNAALEEVAVALHIRKDFYKAEPSMTLKEIKATSTLVSRLTGMVVPKNKAIVGANAFAHESGIHQDGVLKEVTTYEIIEPALVGESQNLFVLGKHSGRHAFTEKMKELGYEFTNDERDAVFEAFKKLADRKKEITEEDLRALMLGEAAFAAQQYNITQLQVHFVSNSTQCATVVLKDEEGNVFEDAATGSGSIEAIYNAIQRILGLECELADYRIQSITQGQDALAHVHVELKEGAHQVSGFGVAQDVLEASARAYVHAAGKLKSFIQLVK

SEQ ID NO: 696 - protein, 417 aa, uncultured archaeon GZfos23H7
MYRSYKELPKIRLPEDRGVEDINISDSTIREGAQMPGIMMHKEHKVKIYEYLHRVGIEKTESFLFNESDREAVKEMLDRGYEKPEVTGWARANPKDIDLVIEADGIEETGILMSVSDAHIFDKLGLKSREEASEKYLEAFDYALDHGLKVRCHLEDITRSDVEEFVLPLITEMIKRAPDTIMRICDTLNYGIPFLYDFPYSVPRIIKELKRRGVRNIETHIHDDYGFGAAVSIAGLWYGASWANLTFLGMGERAGVGELEKVLVFLEQRVENFHKYNLECLSEFADYIEQNVELRVPDNKAVVGRNVFAHESGIHTAGVIKNPFIYEPYPPEIVGAERKLMIGATSGSKVIRHKIEEILREKGGFGGEGRDPKIEKKDPRLKAIQADIRRQYEEDRTSCISDEEMREYVERYFLEIA

SEQ ID NO: 697 - protein, 530 aa, Mannheimia succiniciproducens MBEL55E
MNVHNKRIRTMANNRVIIFDTTLRDGEQALKASLTVKEKLQIALALERLGVDVMEVGFPVSSAGDFESVQTIAVHVKNSVVCGLSRAVNKDIDAAAEALKVAERFRIHTFIATSALHVEAKLKRSFDDVVEMAVAAVKRARRYTDDVEFSCEDAGRTGIDNICRVVEAAINAGATTVNIPDTVGFCLPTEYGNIIHQVMNRVPNIDKAVVSVHCHNDLGMATANSLTAVLNGARQIECTINGIGERAGNTALEEVVMSIKTRQDLFGVDTRINTQEIHRVSQMVSQICNMPIQPNKAIVGENAFSHSSGIHQDGMLKNKNTYEIMSPETIGLKKEKLNLTARSGRAAVKGHMADMGYTEQDYDLDKLYEAFLKLADKKGQVFDYDLEALAFIDMQQGDEDRLKLDVITSQTISTLPASAFVQVELDGKRINKTSNGGNGPVDAVYNAIMQIVGMDLKMSHYNLTAKGEGAEALGQVDIVVEYQGRKFHGVGLATDIVESSALALVHAINAIYRSQKVADLKKDLKHIHTV

SEQ ID NO: 698 - protein, 501 aa, uncultured archaeon GZfos19A5
MHEKNRTIEIFDTTLRDGEQTPGISFTTEQKRTIARQLDALGVDIIEAGTPITSKEEKEVVQLICDEGLSAKICGLARILAQDIDACVDCGVDMIHIFVPSSEIQREHTTKMSEAQVKEQAYKMTRYVKERGFMCMFSAMDATRTRLEFLIDLYKTAEEGGADILNVPDTVGISEPFAMYELVGEIYRAVKVPISIHCHNDFGLAVANSLAAVKAGASEVQVSVNGIGERAGNADLVETVMGLNSIYGLKTNIKTERLFEMAKLIERLTGIPIPVTKPVVGDNAFSHESGIHTHGVIVRSDTFEPGIMTPEMVGHRRRIVLGKHTGKHTIEKKLSEIGMSPSKEELEEILKRIKELGASGKRVTDDDLFSIAEVVMGEIARHERIVVLKELSVMTGNNLIPTASLKAVVRGKECTSAQMGLGPVDAALKAIQQVIGGEIDGDIELKDFRIEAITGGSDALAEVIVGVKKGDRMVTARGVREDIVMASVEAFINAVNRLMQR

SEQ ID NO: 699 - protein, 481 aa, uncultured archaeon GZfos22D9
TLRDGEQTPGVSLRREQKLQIAKQLDILGVDFIEAGTAIISEGEQKAIKAIADEGLKAEISSFARLLKGDIDAAIKCGVDTVNLVAPVSDDHIKKKLRKDRETLRNMTIEMSEYVKGHGLKVEISAEDASRADMVFLKSFFYDLGQIVDRLSFCDTVGVLYPERTKEMFQALCSCDTPVSVHCHNDFGLATANSVAAVMAGAKVVHVTVNGLGERAGNASLDEVVTALELLYGVKTNIAKEKMYETSRVVMNLTKMPVAPNKPLMGDNAFTHESGMHVHGTLADKSLYEPIDPGLIGRKRRFAIGKHTGKASVKMKLDEMGISADDEQMQKILTEVKELGDKAKLITDADFQAIVDDVLHIEREEKIKLVDLSVVSGKNVYPTASLRLEIDGEEVVEAGVGIGPVDAAINALRKAMAEMEMNDLRLEEYHVDAITGGTDALVNVLVKMSRGDETITASGVSADIVIASVYALIDGVNRLYR

SEQ ID NO: 700 - protein, 493 aa, uncultured archaeon GZfos32G12
MQEVKTVKILDTTLRDGEQTPGVSLTPEQKLQIAKQLDILGVDFIEAGTAIISEGEQKAIKAIAAEGLKAEISSFARLLKGDIDAAIKCGVDTVNLVAPVSDDHIKKKLRKDRETLRDMTIEMSEYVKGHGLKVEISAEDASRADMGFLKSFFYDLGQIVDRLSFCDTVGVLYPERTKEMFQALCSCDTPVSVHCHNDFGLATANSVAAVMAGAKVVHVTVNGLGERAGNASLDEVVTALELLYGVKTNIAKEKMYETSRVVMNLTKMPIAPNKPLMGDNAFTHESGMHVHGTLADKSLYEPIDPGLIGRKRRFAIGKHTGKASVKMKLDEMGISADDEQMQKILTEVKELGDKAKLITDSDFQAIVDDVLHIEREEKIKLVDLSVVSGKNVYPTASLRLEIDGEEVVEAGVGIGPVDAAINALRKAMAGMEMNDLRLEEYHVDAITGGTDALVNVLVKMSRGDETITASGVSADIVIASVYALINGVNRLYR

SEQ ID NO: 701 - protein, 509 aa, Bacteroides fragilis YCH46
MGKGVKIEIMDTTLRDGEQTSGVSFVPHEKLMIARLLLEELKVDRVEVASARVSDGEFDAVKMICDWAARRNLLQKVEVLGFVDGHTSLDWIHATGCRVINLLCKGSLKHCTCQLKKTPEKHIEDILAVVDYANELDIEVNVYLEDWSNGMKDSPEYVFRIVDALKETTIKRFMLPDTLGILNPLQVIEFMRKMKKRYPDTHFDFHAHNDYDLAVSNVLAAVLSGVKGLHTTINGLGERAGNAPLASVQAILKDHFNAITNIDESRLNDVSRVVESYSGIVIPANKPIVGENVFTQVAGVHADGDNKSNLYCNDLLPERFGRVREYALGKTSGKANIRKNLESLGLELDEESMKKVTERIIELGDKKELVTQEDLPYIISDVLKHDGMSNKVKLKSYFVTLAHGLKPMATLSIEIDGQVYEESSSGDGQYDAFVRALRKIYKVTLGRKFPMLINYAVSIPPGGRTDAFVQTVITWSFGEKVFRTRGLDADQTEAAIKATIKMLNIIEEY

SEQ ID NO: 702 - protein, 498 aa, Bacteroides fragilis YCH46
MSDRLFIFDTTLRDGEQVPGCQLNTVEKIQVAKALEVLGVDVIEAGFPISSPGDFNSVIEISKAVTWPTICALTRAVQKDIDVAVDALKFAKHKRIHTGIGTSDSHIKYKFNSTREEIIERAVAAVKYARRFVDDVEFYAEDAGRTDNEYLARVIEAVIKAGATVVNIPDTTGYCLPSEYGAKIKYLVDHVAGIENAIISTHCHNDLGMATANTMAGILNGARQVEVTINGIGERAGNTALEEIAMIIKSHHEIDIETNINTQKIYPTSRMVSSLMNMPVQANKAIVGRNAFAHSSGIHQDGVLKNVQTYEIIDPHDVGIDDNSIVLTARSGRAALKNRLSILGVTLDQEKLDKVYEEFLKLADRKKDIHDDDILVLAGADRSGNHRIKLEYLQVTSGVGVRSVASLGLNIAGEKFEAAASGNGPVDAAIKALKRIIDRHMTLKEFTIQAISKGSDDVGKVHMQVEYDNQMYYGFGANTDIIAASVEAYIDCINKFTK

SEQ ID NO: 703 - protein, 515 aa, Burkholderia pseudomallei K96243
MTDKLIIFDTTLRDGEQSPGASMTKEEKIRIAKQLERMKVDVIEAGFAASSNGDFDAIQTIASQVKDSTICSLARANDKDIQRAADALKPANSFRIHTFIATSPLHMEKKLRMTPDQVFEQARLAVRFARKFTDNIEFSPEDGSRSDMDFLCRVLEAVIAEGATTINIADTVGYGVPELYGNLVKTLRERIPNSDKAIFSVHCHNDLGMAVANSLAGVKIGGARQVECTINGLGERAGNTSLEEIVMAVKTRKDYFGLDLGIDTTQIVPASKLVSQITGFVVQPNKAVVGANAFAHASGIHQDGVLKARDTYEIMRAEDVGWTANKIVLGKLSGRNAFKQRLQELGVSLDSEAELNAAFARFKDLADRKAEIFDEDIIAIVTEEESALAQEHEHYKFVSLAQRSETGERPQAKVVFAVDGDEVAGEASGNGPVDATFNAIETEVGSGAELLLYSVNAITTGTQAQGEVTVRLSKSGRIVNGVGTDPDIVAASAKAYIAALNKLYSNADKLNPQRA

SEQ ID NO: 704 - protein, 185 aa, Helicosporidium sp. ex Simulium jonesii
MQCVQGISGTRVRASCVGARPNRQVRGCQRGVAGRAEAPSRQRPDYVPHHISDPNYVRIFDTTLRDGEQSPGATLTSKEKMEIAKQLAKLGVDIIEAGFPMSSPDDFQAVKSIAQEVGTHVVDGYSPVICGLARCREPDLERSWDAVRHARLARVHYFIATSPIHMEYKLRMSKEQVLRAAVRGA

SEQ ID NO: 705 - protein, 313 aa, Helicosporidium sp. ex Simulium jonesii
DPNYVRIFDTTLRDGEQSPGATLTSKEKMEIAKQLAKLGVDIIEAGFPMSSPDDFQAVKSIAQEVGTHVVDGYSPVICGLARCREPDLERSWDAVRHARLARVHYFIATSPIHMEYKLRMSKEQVLRAAVRGAEHLRSLGCRDIEFSAEDATRSDPDFLVDVLSAAIEAGATTINIPDTTGWALPSEFGGLIQTLRQRVRGAANVVFSTHCQNDLGLSTANSLAGAWAGARQVEGTINGIGERAGNASLEEIIMAIALRGEEQLGGLWTGARPVHIAPTSKMVCDFSGMAIQPHKAIVGANAFAHETGIHQDG

SEQ ID NO: 706 - protein, 384 aa, Methylococcus capsulatus str. Bath
MVAQRVTINDTTLRDGEQTAGVAFTAEEKLSIARALARAGVPEMEVGIPVMGAEEQEVIRAIAGLGLSARLMVWGRMCERDLAAAADCGADRVNLSIPVSDIHLRHKVNRTREWVLASIDRFVKRGLDAGLEVCVGCEDASRADPDFMLQVAEAAQRAGARRIRFADTLGLLEPMSTFERIRRLAVATDLEIEMHAHNDFGLATANTLMAVQAGASHVNTTVNGLGERAGNAAIEETVMALHQLYGIDTGIAVDHFPEISGLVAAASGRPVAANKSIVGEAVFTHEAGIHVDGLLKNLINYQGVDPKDLGREHRLVLGKHSGTHAVKRSFRQLGIELSETDAGRLLKRIRIHASQTKRPPSETELKLFYAETSVSSQPRPGLFG

SEQ ID NO: 707 - protein, 514 aa, Methylococcus capsulatus str. Bath
MHDRLIIFDTTLRDGEQSPGASMTRDEKVRIARALERLKVDVIEAGFPAASPGDFEAVQAVARTIKDSRVCGLARALDRDIDRAGEALKDAQRARIHTFIATSPIHMRHKLQMSPDQVVEYAVKAVKRARQYTDDVEFSPEDAGRSEEDFLCRILEAVIDAGATTLNIPDTVGYAFPEQFGHMIGRLIERIPNSDKAVFSVHCHNDLGLAVANSLAAVLHGARQVECTINGLGERAGNAALEEIVMAVRTRKDIFPCHTDIETREIVACSKLVSSITGFPIQPNKAIVGANAFAHESGIHQDGVLKSRETYEIMSAEDVGWSTNRMVLGKHSGRNAFRTRMQELGIEFASEEELNSVFQRFKVLADKKHEIFDEDLQALITEAGAEAEDERVKLVALRVCSETGEIPHAQVTIKVDNEERTGTSSGGGAVDASLKAIESLLHTDTALTLYSVNNITSGTDAQGEVTVRLEKGGRIVNGQGADTDIVIASAKAYVNAVNKLLAPIQRTHPQVGDV

SEQ ID NO: 708 - protein, 505 aa, Brassica oleracea
MASSLLTSSGIIPTTSSNMVVRSFLPFGSVRLTRPYNKSSLLISCCSSVSKKAETSGTDLKTVVERWPEYIPNKLPDKNYVRVFDTTLRDGEQSPGAALTPPQKIEIARQLAKLRVDIMEVGFPVSSEEEFETIKTIAKTVGNEVDEETGYIPVICVIARSKERDIKAAWESVKYAKRPRIVIFTSTSDIHLKYKLKMTREEVVEMVASSIRFAKSLGFEDIEFGCEDGGRSDKDYICKVFEEAIKAGATTLACPDTVGINMPHEYGKLVRYIKANTPGIDDVIFSAHCHNDLGVATANTIAGICAGARQVEVTINGIGERSGNAPLEEVVMALKCRGAFVMGGVYTRIDTRQIMATSKMVQEYTGLYVQPHKPIVGANCFVHESGIHQDGILKNRSTYEILSPEDVGVVKSQNSGIVLGKLSGRHAVKGRLKELGYEISDEKLNEVFSRFRDLTKQKKRVTDDDLRALVTCGDEIFSSEKLNGTNDNEINRNGYVPSPQISSVV

SEQ ID NO: 709 - protein, 423 aa, Brassica oleracea
MASSLLTSSGMIPTTGSNMVFRSFLPFGSVRLTHPYNNSSLLISCCSSVSKNAETSGTDLKTIVVDEETGYIPVICVIARSKERDIKAAWESVKYAKRPRILVFTSTSDIHMKYKLKMTREEVVEITKSSIRFAKSLGFKDIEFGCEDSGRSDKDYICKVFEEAIKAGATTVAFADTVGINMPQEYGELVRYVKANTPGIDDAIFSVHCHNDLGVATANTIAGVCAGTRQVEVTINGIGERSGNAPLEEVVMALKCRGAYLMGDVYTRIDRRQIMATSKMVQEYTGLYVQPHKPIVGANCFFHESGIHQDWILKNRSTYEILSPEDVAVVKSQNSGIVLGKLSGSHVVKGRLKELGYEIDDEKLNEVFSRFRDLTKQEKRITDDDLKALVTLCGDEIFSSEKLNGKEINSKGYAPDPQISSAV

SEQ ID NO: 710 - protein, 514 aa, Photobacterium profundum SS9
MKDQVIIFDTTLRDGEQALSASLTVKEKLQIAYALERLGVDVIEAGFPISSPGDFESVQTIAKHIKNSRVCALSRAVAKDIDVAAESLKVAEAFRIHTFISTSTIHVQDKLRRSYDDVIEMAIAAVKRARNYTDDVEFSCEDAGRTPIDNLCRMVEAAINAGARTINIPDTVGYTLPSEFGGIVAQLFNRVPNIDKAIISVHCHDDLGMSVANSMAAVQAGARQVEGTINGLGERAGNCSLEEIAMIIKTRSDFLGVETNIKHEEIHRTSKMVSQLCNMPIQANKAIVGANAFNHSSGIHQDGMIKNKNTYEIMTPESIGLKSQALNLTSRSGRAAVKNHMDTLGYIDGDYNLDTLYADFLKLADRKGQVFDYDLEALMYFANLRDEDDFFKLNYLSVQSGSIMATTSIKLQCGDEEKCEAAVGNGPVDALYQCIYRLTGYEIALDKFDLTAKGEGEDGLGQADIIANYKGRKYHGTGLATDIVEASGQALLHVINSIYRADQIAEIKERIATV

SEQ ID NO: 711 - protein, 515 aa, Buchnera aphidicola
MNQKVIIFDTTLRDGEQALQASLSINKKIQIAQSLERMGIDIIEVGFPISSPGDYKAVQMISQKIKNSKICSLARCLKEDIEIAAKAMKNAISPRIHLFLGTSTLHIQSKLKKNFSEIVDMMLMSIKWAKRYTDDVEFSCEDAGRTSLDDLCYIVEKAIHAGAKTINIPDTVGYTIPTQFKNIIQTLFLKVPNIHKAIISVHCHNDLGMATGNSISAIEAGDVKIEGTINGLGERAGNTALEEIIMALKIHEKTLNVYTNIKYQEISRTSKIVSHLCNTPIALNKSIVGKNAFSHSSGIHQDGVLKNRENYEILDPNSIGLKSCPLNLTSRSGRAAIKHRMKELGYLETDYNLDILYIDFLKLADKKGQIFDYDLEALAFINQQQVKTEFFKLEYFHVESKLSGLATASIILLCGKKINIQKSTTYNGPVDAIYQALNKAALYPIVLKKFHLEANGEGKDALGKVDIVVKYKCRNFHGIGLATDIIEASAQALINVFNGIWKSQQVDKKLEKLCK

SEQ ID NO: 712 - protein, 344 aa, Haloarcula marismortui ATCC 43049
MGTHVIEAGFPVNSDAEFEAVRDIAESTQVTTCGLARVVEKDIEAALDSGVDMVHTFVSTSDVQLQDSMHATRQEALDTAVDCVEMIKDAGVECMFSPMDATRTDEDFLVEVIEATSAAGADWINIPDTCGVATPRRFYDLIEIVDDCTDAYIDVHTHDDFGLASANAISGFEAGASQAQVSVNGIGERAGNAAYEEVVMALESLYDVDTGIDTTRITELSRIVEEKSDIGVPANKPVVGRNAFSHESGIHAAGVIENSDTFEPGVMTPEMVGATRELVLGKHTGAHSVRERLVDAGYDPSEAEVREVTRRVKEYGAEEQVTMSVLERFAEEIGVTEESEEVRA

SEQ ID NO: 713 - protein, 502 aa, Haloarcula marismortui ATCC 43049
MRALSDVGEVQFLDTTLRDGEQAPGVSLTPDDKADIARSLDAARIDVIEAGSACTGPGERETISRVAGLDLDSTVTSFCRGIQNDIDLALDCGVDGINLVVPASDKHVEQKVGTSKSENVDNTVELVEYAVDHGLWVEVIGEDGSRADLDYLEELLGAAVEAGADRICWADTVGHATPDRALECVSRLSDLGPVSTHTHDDLGLAVTNALVSIAAGADLVHGTINGIGERAGNVALEEVAIALDHGYGVESMALTEVYDLAQLIANRTGIPLAPNKAVVGENAFTHESGIHTDGTLKDDSMYEPYPPEKVGRERRLALGKHAGRAGVEAALDEHDVEVTDDQLSEIVSRVKEIGDRGKRVTDADLLTIADEVTDDARARRVELLGLTAVSGSDTPTASVRLSVDGEERKEAAVGSGPVDAAMNAAEVALSHTADATLEDYHVDAITGGTDALVTVEIEMSRGDDHVVVSASDSDITRASVRAMVDAMDRLVADDEEPLVADD

SEQ ID NO: 714 - protein, 536 aa, Streptococcus thermophilus LMG 18311
MFFLLLLFLLLERGLSMRKVEFLDTSLRDGEQTPGVNFSIKEKVAIAKQLEKWGISSIEAGFPAASPDSFEAVKQISAAMTTTAVSGLARSVKSDIDACYEAIKDAKFPQCHVFIATSPIHREFKLKKSKEEILEIIKEHVTYARERFDVVEFSPEDATRTELDYLLEVVQTAVDAGATYINIPDTVGFTTPEEFGHIFKYLIENVKSDREIIFSPHCHNDLGMAVANTLAAIKNGAGRVEGTVNGIGERAGNAAIEEVAVALNIREDYYQATSDIVLNETVNTAELVSRYSGIAIPKNKAVVGGNAFSHESGIHQDGFLKNPLTYEIITPELVGVKKSSLPLGKLSGRHAFIEKLKELELDFVEKDIKPLFAKFKRLADKKHDITDADIRALVAGTNVENPEGFHFQDLRLTTNPDETITAAVSLVNEDGEAVEFLANGQGSVEAIFNAIDKFFNQTVRLTSYNIDAITDGIDAQARVLVSVENVDTDTIFNASGLDFDVLKASAIAYINANTLVQKENAGEMARKVSYRDLPQT

SEQ ID NO: 715 - protein, 530 aa, Streptococcus thermophilus CNRZ1066
MFLLLERGLSMRKVEFLDTSLRDGEQTPGVNFSIKEKVAIAKQLEKWGISSIEAGFPAASPDSFEAVKQISAAMTTTAVSGLARSVKSDIDACYEAIKDAKFPQCHVFIATSPIHREFKLKKSKEEILEIIKEHVTYARERFDVVEFSPEDATRTELDYLLEVVQTAVDAGATYINIPDTVGFTTPEEFGHIFKYLIENVKSDREIIFSPHCHNDLGMAVANTLAAIKNGAGRVEGTVNGIGERAGNAALEEVAVALNIREDYYQATSDIVLNETVNTAELVSRYSGIAIPKNKAVVGGNAFSHESGIHQDGFLKNPLTYEIITPELVGVKKSSLPLGKLSGRHAFIEKLKELELDFVEEDIKPLFAKFKRLADKKHDITDADIRALVAGTNVENPEGFHFQDLRLTTNPDETITAAVSLVNEDGEAVEFLANGQGSVEAIFNAIDKFFNQTVRLTSYNIDAITDGIDAQARVLVSVENVDTDTIFNASGLDFDVLKASAIAYINANTLVQKENAGEMARKVSYRDLPQT

SEQ ID NO: 716 - protein, 520 aa, Thermus thermophilus HB8
MEKERHIRIFDTTLRDGEQSPGVALSLDQKLEIAQALAQLNVDIIEAGFPVSGPMEFEAVRRIATEVKGPIIAALARTHTLDIDQAAKALEKAEKPRIHVFTSASKVHLQYMLRKTEEEVLEMADRMVRYARRYVDDVEFSAQDVMRADWEFVKRLYEVAIEAGATTINIPDTTGYGTPQEYGALIRRIRDEVVRGRDVVISTHTHDDLGMATANALAGVENGAGQIECTINGIGERAGNCALEEVVMALYVRRDWYKAYTRINTREIYRVSRLVERYTGMPVPPNKAIVGDNAFAHESGIHQDGVIKHRATYEIMDAELIGRRPAVLVLGKHSGRAAFKKALEDLGYKDLSEEEVKKLFARFKEIAEKKGPLSAEELQALVESEREPTSHFFQLEHVQFFSGSGLLPTATVKVKTPDGERLATHTGDGPVDAVYKAIQEAIGLRPELELYRVEAITGSTEALGQVTVRLRLGELQAVGVGVSPDIIEASALAFLDAAGKLASGRATRHPPSIEEVHRGV

SEQ ID NO: 717 - protein, 249 aa, Fragaria x ananassa
MAYENKPNTDLDADAQRRLGRGKIEIKRIENTTNRQVTFCKRRNGLLKKAYELSVLCDAEVALIVFSNRGRLYEYSNNSSVRETIERYKKACADTSTNGSASEATTQYYQQEAAKLHNQINALQNINRGYMAEGLSNKNIKELKGMERKLERAITRIRSKKNELLFAEIEYMQKRELDLHNNNQLLRAKIAENERQQQSIIAITGGHGSYEIVQPTQPFHEARNYFQVNALQPNIHQYSCHDQVSLQLV

SEQ ID NO: 718 - protein, 523 aa, Salmonella enterica subsp. enterica serovar Paratyphi A str.
MSQQVIIFDTTLRDGEQALQASLSAKEKLQIALALERMGVDVMEVGFPVSSPGDFESVQTIARTIKNSRVCALARCVEKDIDVAAQALKVADAFRIHTFIATSPMHIATKLRSTLDEVIERAVYMVKRARNYTDDVEFSCEDAGRTPVDDLARVVEAAINAGARTINIPDTVGYTMPFEFAGIISGLYERVPNIDKAIISVHTHDDLGIAVGNSLAAVHAGARQVEGAMNGIGERAGNCALEEVIMAIKVRKDIMNVHTNINHHEIWRTSQTVSQICNMPIPANKAIVGSGAFAHSSGIHQDGVLKNRENYEIMTPESIGLNQIQLNLTSRSGRAAVKHRMEEMGYKDTDYNMDHLYDAFLKLADKKGQVFDYDLEALAFINKQQEEPEHFRLDYFSVQSGSSDIATASVKLACGEEIKAEAANGNGPVDAIYQAINRITGYDVELVKYDLNAKGQGKDALGQVDIVVNHHGRRFHGVGLATDIVESSAKAMMHVLNNIWRAAEVEKELQRKAQNKENNKETV

SEQ ID NO: 719 - protein, 515 aa, Geobacillus kaustophilus HTA426
MRKIKFFDTTLRDGEQSAGVNLNLQEKLEIARQLERLRVDIIEAGFPASSKGDFEAVKQIAETVRTCSVTGLSRSVRSDIDAAWEALKGGAEPRLHLFIATSPIHMVHKLRMTPEQVIEAAVEAVKYAKRFFPIVQWSAEDACRSELPFLAKIVAEVIKAGASVINIPDTVGYITPKEYGEIFLYLQNNVPNIENVSLSAHCHDDLGMAVVNSLSAIEHGATQVECTINGIGERAGNAALEEIAVALHIRKDYYQVETRLNLQEIKRTSNLVSKLTGVVVPPNKAVVGKNAFAHESGIHQDGVLKEKTTYEIISPELVGVPSNSMVLGKHSGRHALRNRVEELGYTLSDEEINQLFVRFKELADKKKDITDDDLIALIFEEKFDHFKDFYQLSSIQVQYGTNQIPTAVVVLKDGKGNEIQEAATGAGSVEALYNTLERCFQTPVTLLDYRIESVGGGRDALAQVFVKVRAHDIETSGRGTAQDVLEASAKAYINAINRVFMIEAMRGENEKVATP

SEQ ID NO: 720 - protein, 511 aa, Azoarcus sp. EbN1
MKDHLIVFDTTLRDGEQSPGASMTRDEKLRIARQLERMRVDVIEAGFPAASNGDFESVRAIAEAIRESTVCGLARANEADIRRAGEAIAPAARGRIHTFIATSPIHMEMKLRMSPDQVVEQAVRAIGWAKEYTDDIEFSAEDAGRSEIDFLCRIFEAVIKAGAKTINVPDTVGYNVPEQYAHTIRTLIERVPGADKVVWSVHCHNDLGLAVANSLAAVMAGARQVECTLNGLGERAGNAALEELVMAVRTRQDVFPCDTRIDATQIVPASKLVSGVTGFPVQPNKAIVGANAFAHESGIHQDGVLKHRETYEIMRAEDVGWGANKLVLGKHSGRNAFRSRLQEIGIVVASEEHLNHAFARFKELADKKHEIFDEDIQALMSDEVVTPDQEHYRLVASRFHSETGETPRADLTLSVDGQETRTSAEGSGPVDAAFKAIEAIAGSGTELLLYSVNAITTGTDAQGEVTVRLAREDKVVNGQGADTDIIVASAKAYLNALNKLHSKLERLNPQL

SEQ ID NO: 721 - protein, 386 aa, Zymomonas mobilis subsp. mobilis ZM4
MPAKSDKHLIINDTTLRDGEQAPGVAFTLSEKLHIAKALDKAGVDEIEAGIPAMGASEIEAIRQIVQQSQTARVIPWCRMKISDVDKALETGAKTVHLSISSSPFQMAAKFPDLSAADILGLCQKVISYAKDRGLEVSVGAEDASRAEISFLTDLLGVIEEAGAFRIRFADTLGILDPFATYEIISQLHQISPLDIEFHGHDDLGLATANSLAAIKAGAKGASVTVLGLGERAGNASLEQVVIAASHIAGKETRIRPEKLYNLAQYVAQAAGRTIPPDKAIVGEAVFQHESGIHVAGLLRNPASYEALNPEKLGRQREIVLGKHSGRAAIRHALSLLGIKAQEDMIQNLLAAVKMQASHQKRAIGLSEIALIHQNFTHTQPNAGLR

SEQ ID NO: 722 - protein, 524 aa, Silicibacter pomeroyi DSS-3
MTHVTDQDRVLIFDTTLRDGEQSPGATMTHTEKLEIAEMLDEMGVDIIEAGFPIASEGDFKAVSEIAKRAQNSRICGLARANFADIDRCWEAVKHAEKNRIHTFIGTSPLHRAIPNLTQDEMAEKIHETVSHARNLCDNVQWSPMDATRTEWDYLCRVIEIAIKAGATTINIPDTVGYTAPAESADLIRRLIETVPGADDVIFATHCHNDLGMATANSLAAVAGGARQIECTINGLGERAGNTALEEVVMAMKTRHDIMPWRTGIDTTKIMAISRRVATVSGFNVQFNKAIVGKNAFAHESGIHQDGMLKNRENFEIMRPEDIGLSGTSLPLGKHSGRAALRDKLEHLGYEVGDNQLKDIFVRFKELADRKKEVFDDDVIALMRSGENAEQDHLQLVSMKVICGTGGPAEATVEMEIDGKDVSATAHGDGPVDASFKAIRALHPNEAHLQLYQVHAVTEGTDAQATVSVRLEEDGMIATGESANTDTVVASAKAYINALNRLIVRREKAGPGADAREISYKDLT

SEQ ID NO: 723 - protein, 457 aa, Francisella tularensis subsp. tularensis SCHU S4
MDKQKIYIFDTTLRDGQQSPGAGMSFEDNIAYADLADKLNIDVLEAGFPSASNTDFEIVNTISKRMAERNSNMIIAGLCQLRKNQVEITMDALRPSLAIGKARVHMYLPVDPNLAQASLGSKNDNEQNIKNVYELVKLASDEGFEVEFSAEGYSRLGDTFDYVTNVFRAAVAAGVKVINCPDTIGGACERENDNYFIKNMAKHAEIIKKEFPDRNIIWSAHCHNDLGLALENSMNAVFDGPARQVEGCINGVGERAGNASLEQCVMFINLFGKQKDYHYYNDVNIAHFKTISDFIGKRILSRQPHHPITGLNSARHTSGGHTNAILKNPLAYQPFHPESVGNEISFIFGPLSGGNHAKKIIEENGYICDDKEKAAIAQQIKDIYHERRKGITDEELIQAYKQIKSPIHVSAIDYGKSNGETYVELKGRFFGNTDYRITGRGENSALSALLKGIQEYI

SEQ ID NO: 724 - protein, 540 aa, Synechococcus elongatus PCC 6301
MASASSNDRILIFDTTLRDGEQSPGASLNLEEKLVIARQLARLNVDIIEAGFAFASPGDFGAVQRIAAEVGTPDGPTICSLARATRQDIKAAAEALAPAAKGRIHTFIATSDIHLEYKLKKTRAEVLAVIPEMVGYAASLVDDVEFSPEDAGRSDPEFLYECLEAAIAAGAKTINIPDTVGYTTPSEFGALIGGIKQNVCNIDQAIISVHGHNDLGLAVANFLEAVKNGARQLECTINGIGERAGNAALEELVMALHVRRQYFNPFLGRAADSEAPLTQVNTREIYKTSRLVSNLTGMLVQPNKAIVGANAFAHESGIHQDGVLKNKLTYEIVDAETIGLSTNRITLGKLSGRNAFRTRLQELGYDLGEDDLNRAFLRFKELADKKREVTDRDLEAIVNDETQQAPELFKLELVQVSAGDHARPTATVTLRTPEGEELTDAAIGTGPVDAIYRAINRVVNIPNELIEFSVKSVTAGIDAIGEVTIRLRHEDRIFSGHSANTDILVASAQAYIHALNRLAEALQKDKPLHPQEPIVAGMGR

SEQ ID NO: 725 - protein, 514 aa, Bacillus clausii KSM-K16
MRKINVFDTSLRDGEQMPGIALTVKEKLEIARQLERLGVDIIEAGFPASSPGDFQAVKEIAETVKGSSITGLARAKKSDIDSAWEALKSSAEPRVHVFLATSPIHMEHKLKLTPDQVVERAVESVRYAAEKFPHVQFSAEDANRSEWPFLKRIIEAAIDAGASVINLPDTVGYRTPEEISKLFEFVTENVKNIDRAILSTHNHDDLGMGVANSLAAISAGAGQVECTINGIGERAGNAALEEIAVALQIRSDYYQAKTGLKLSELKRTSALVSRLTSMNVPGNKAVVGANAFAHESGIHQDGMLKNKETYEIITPELVGATSSLPLGKHSGRHAFKTKLNELGFSGSDEKLQTIFSAFKQLCDKKKEVTEDDLYALIADATDDQDSTAYELTALQVTYGMNHVPTATIRLKKQDDREIEEAGTGSGSVEAIYNTLAKMTGGNYSLADYRIQSVNGGEDALAEVHVRIQADDFEQSGRGVAHDVLEASAKAYLHAVNRVIARKHYAKREMAKVES

SEQ ID NO: 726 - protein, 505 aa, Dehalococcoides ethenogenes 195
MDKIKIFDTTLRDGEQAAGASLNAQEKLEIARQLEKLGVDIIEAGFPITSPGDFEAVKLIAQEVRTPVICGLARAIPADIDRAWEALKEAAHPRIHVFISSSEIHMVHQIKKSREEVMELARTMVARAKSYTDDIEFSPMDASRSDPEFLYKLLEAVIDAGATTLNIPDTVGYAIPSEFGELIKGIRQNVPNINKAVISVHCHDDLGMGTANSLAAVKNGARQVECTLNGIGERAGNAALEEVVMALRTRSDFFNFETGINTQEIYRSSRLVSALTGFAIQPNKAVVGENAFRHQSGIHQDGVIKMAKTFEIMDPKEVGIQASSLVLGKLSGRHAFKQHLTELGFDLNEEDFDRAFKAFKDLADKKKDVTDRDIEALVAEELRTTVELYHLDRIQVTSGDRGIPTAAVRLTTPNGGAAEDAALGSGPVDAVYKAINRIVNVPNKLTEFSVKSVTAGIDALGEVLIRIESDGVTYTGRGSDTDIIVASAKAYMNALNRLLRVKNAS

SEQ ID NO: 727 - protein, 511 aa, Campylobacter jejuni RM1221
MKDNKIIIFDTTLRDGEQALGSSLGINQKLQIALALENLGVDVIEAGFPVSSQGDFKAVQKIASKVKNSTICALSRALDKDIDMAYEALKVAKHFRIHTFIATSTLHMQDKLKKDFDEILSMAKRAIIRARSYTDDVEFSCEDAGRTPIDNLCFMVENAIKAGAKTINIPDTVGYTLPSEFANIIKILFNKVPNIDKAIISVHCHNDLGMATGNSLSAILQGARQIECTINGLGERAGNCALEEVVMAIKTRKDYLKGFYTDIKCENIFKTSKLVSAITNESIPSHKAIVGSNAFSHSSGIHQDGVLKNRQTYEIISPSAIGIHDNRMLMTARSGRAMIKTCLENLGYDENTYNLDDVYERFLRLADKKGQVYDYDLEALMFLSYENEEENEFVIEKLSVISGNIPTACVCMRIKEELKTEACTGNGPVEAVFNCIARITNLKPVLKAYSINAKSSGVDAQGQVDVDLEFKGRKFHGKGLSTDVIEASAQAFASAYNAIYRSLKVEERKMA

SEQ ID NO: 728 - protein, 511 aa, Campylobacter coli RM2228
MKNNKIIIFDTTLRDGEQALGSSLNINQKLQIALALENLGVDVIEAGFPVSSQGDFEAVKNIASKVKNSTICALSRALDKDIDTAYEALKVADSFRIHTFIATSTLHIQDKLKKDFDEILAMAQRAIARARNYTDDVEFSCEDAGRTPIDNLCFMVENAIKAGARTINIPDTVGYTLPSEFANIIKILFNKVPNIDKAIISVHCHNDLGMATGNSLSAILQGARQIECTMNGLGERAGNCALEEVVMAIKTRSDYLKGFYTDIKCENISKTSKLVSAITNESIPSHKAIVGSNAFSHSSGIHQDGVLKNRQTYEIISPSSIGLHENRMLMTARSGRAMIKTCLDNLGYDEKTYNLDEVYESFLRLADKKGQVYDYDLEALMFLSYENDEENELVLEKLSVISGTIPTACVCVRIKEELKTEACTGNGPIEAVFNCISRITGLNPVLKAYSINAKSSGVDAQGQVDVDLEFKGRKFHGKGLSTDVIEASAQAFISAYNAIYRSLKVEERKAV

SEQ ID NO: 729 - protein, 361 aa, Thermococcus kodakarensis KOD1
MVLDSTLREGEQTPGVNFSPEDRLRIGIALDEVGVDFIEAGHPAVSGEILEGIRLLASHGLNANILAHSRALRSDIDLVLKAEAEWIGIFMCLSQRCLERRFRTDLSGALTRVEDAILYAKDHGLKIRFTPEDTTRTEWKNLTAALNLARELKVDRVSIADTTGAAHPLEFYDLVKRVVEFGIPVNVHCHNDLGLALANAIMGIEAGATLVDATVNGIGERAGIVDLSHLLAALYYHYGVKKYRLEKLYSLSRLVSEITGLQVQVNYPIVGQNAFTHKAGLHVSAVVRDPSFYEFLPAETFGRERTIYVDRFAGRETIRFHLSRFGIHDEEIIEELLRRVKASRRPFTPEMLAEEARRMMT

SEQ ID NO: 730 - protein, 509 aa, Staphylococcus aureus subsp. aureus COL
MSSHIQIFDTTLRDGEQTPGVNFTFDERLRIALQLEKWGVDVIEAGFPASSTGSFKSVQAIAQTLTTTAVCGLARCKKSDIDAVYEATKDAAKPVVHVFIATSPIHLEHKLKMSQEDVLASIKEHVTYAKQLFDVVQFSPEDATRTELPFLVKCVQTAVDAGATVINIPDTVGYSYHDEYAHIFKTLTESVTSSNEIIYSAHCHDDLGMAVSNSLAAIEGGARRIEGTVNGIGERAGNAALEEVALALYVRNDHYGAQTALNLEETKKTSDLISRYAGIRVPRNKAIVGQNAFSHESGIHQDGVLKHRETYEIMTPQLVGVSTTELPLGKLSGKHAFSEKLKALGYDIDKEAQIDLFKQFKAIADKKKSVSDRDIHAIIQGSEHEHQALYKLETLQLQYVSSGLQSAVVVVKDKEGHIYQDSSIGTGSIVAIYNAVDRIFQKETELIDYRINSVTEGTDAQAEVHVNLLIEGKTVNGFGIDHDILQASCKAYVEAHAKFAAENVEKVGN

SEQ ID NO: 731 - protein, 381 aa, Staphylococcus aureus subsp. aureus COL
MIRIQDNTIRDGMQQSNVRKSLIIKKEVLKQINKLNINSVEVGMCTTIEDEFNIHQFRDIISPEKELVVLTRLNEKEIKKIVKLKIHNLVVKILLPISDLHIKEKLNFSNKYYIQKIKDCLDILKKDKKGVDICFEDGTRTSREKLKEYMEIISKYQVRTVTFADTVGCSTPLEYGDIFNYFVKKYSNIIFSAHCHNDLGLATANTLAAILNGAKQIETTFLGIGERAGNAPIEEIITILTKKQIESTEFTLPDVYKTSINISKILDFQISENKPIIGENIFKHESGIHQDGTKKNINMYQYLVPSDLGLKNSQVVQFPISNISSKKILHNKFKSIVNTEEIDENISFYKLVNKFSPEVAPEDTVDLLQIIKRRSKDGNFK

SEQ ID NO: 732 - protein, 376 aa, Cyanothece sp. ATCC 51142
MNHVHVNDTTLRDGEQAAGIVFSAIEKIAIACLMDAIGIPELEVGIPAMGGSEAESHHRHCPKRLKTALLGLEPCGSSDIEASIACGLRRVHISVPVSDIQIKAKFKGKTNLVWDRLRDSINFALDHDLFVSVGAEDASRADESFLVEVAQFAESLGASRFRFCDTVGILNPLTTAQKVGKLVKSIKMPIEMHTHNDFGLATANALAGLQAGAVSVNTTVNGLGERAGNAALEEMIMALKRLYQVDLGMESSRLRELSQLVVKASGIPLPPWKAIVGTMFAHESGIHAHGVLQNPQTYEPFSPDEVGWKRRLVVGKHSGRHLLTNLLSQHGISLNHEESQVVLDSVRHLSVQMKRSLTVEELIDVVTNRSMSHGIV

SEQ ID NO: 733 - protein, 192 aa, Chara globularis
MGRAKIEIKRIDNATSRQVTFSKRRNGLLKKAYELSVLCDADIAVIMFSPTGKLFEYANSSMKEILDRYHSCPPEQREKRKFDNTDYLSKEAKRLRHEVELAKQENRHLSGEDLNAVQMPELDGLELKLEDALRKIRFRKREVMQMEIDRLQQKVWTSSPQFLLAWRSCHPAVVQIIIFCSHPAFVPKFILQ

SEQ ID NO: 734 - protein, 336 aa, Coleochaete scutata
MGRGKIEIRRIENATSRQVTFSKRRNGLLKKAYELSVLCDVDIAVIVFSPTGKLFQYASSSMKEILERYEQVPPEQKEKGSQRLDNMDYLNREVAKLRNEVEHKYHEARQLEGEDLDRLGVYELEQLEQKLSNSMRRIRGRKDELMKAELEGLRKQVADMETALVGAASFDGRPLSGSSNYLLQSIPGIRTMPPSSLGGMNPASTSLQLGSDRLFGNRGVELHDRSASDESPVMTNRMSVDFAQAPREMSGVDLSGSPVPPWKSQAAAAAQQEWKNQASSPTDWKVTNTEHLDSWPKAPAPTPEWKSTSVQPEWKNQSSPSSEWKPLDWMYHGPQD

SEQ ID NO: 735 - protein, 523 aa, Gluconobacter oxydans 621H
MSFHHPSFGTIADDRVIIFDTTLRDGEQSPGFSMNLEEKLRMAHALSNLGVDVIEAGFPVASEGDFESVRRIAEEVRGSVICGLARSGGKRDIESCGEALKKAERPRIHNFISTSPLHMKYKLRMEPETVLEIIASGNQKARQFTDDVEWSAEDGSRTDPDFLCRCVEVAIRNGANTINIPDTVGFATPEEMRAIFTMLRERVPGADQVIFSAHNHNDLGLGVANTLASVEGGARQIECTINGIGERAGNAALEEIVMALRTRHDQYGKTTGIETTKLLGMSRMLATITGFDVQPNKAIVGRNAFAHESGIHQDGILKNAATYEIMTPESVGWNKTSLVMGKHSGRAAFRDKLAQLGYPPLEDEALNAAFARFKDLADSKKVVFDDDIRALVDDESRDHERVHLISLELASGTKQKSHAKLEISVDGAIQYAAVSGNGPVDAAFRAIGEAFPHTAELALFSVANVTEGTDAQARTTVRLQENGKLVDGQGADADTVVSAVRAYIHALNKLLTKRERTEPEALS

SEQ ID NO: 736 - protein, 491 aa, Cryptococcus neoformans var. neoformans JEC21
MCPPADEPINAGADQDMVAIETNTPHISTSSANQVNGTTGTAEAQPPAVKTHKGLYGRASDFLSNTSNWKIIESTLREGEQFANAFFTLETKIKIAKMLDEFGVEYIELTSPAASPESRAHCEAICNLGLKRTKILTHIRCHMDDARLAVETGVDGVDVVIGTSSFLREHSHGKDMTWITKTAIEVIEFVKSKGIEIRFSSEDSFRSELVDLLSIYRTVDKIGVNRVGVADTVGCADARQVYELVRTLRGVVSCDIETHFHNDTGCAIANAYAALEAGATHVDTSILGIGERNGITPLGGLIARMMVADPEYVKSKYNLTMLRELENFVAEAVEVQVPFNNYITGFCAFTHKAGIHAKAILANPSTYEILNPADFGMTRYVSIGHRLTGWNAVKSRVEQLNLKLNDEQVKDATAKIKELADVRTQSMEDVDMILRIYHTGIQSGDLKVGQSAVLDRLLEKHMPSRDNSPSGRSSNADGTPAKRQRVGEPSA

SEQ ID NO: 737 - protein, 382 aa, Rhodobacter capsulatus
MTPDRTLALCDTTLRDGEQTAGVAFSLAEKKAIARALDRAGVAEIEVGIAAMGWAEVAEIRAVVAEIAHATPVVWCRLRMHDLDMAQKTGVKRVHFAVPTSTAQLEGKLRVDRDWILRETAALVFCASDRGLQVSVGAEDASRTDPDFLIRLAEVAAAAGAIRFRIADTLGLLDPLGAFRLVAELSARISLPIEMHAHNDFGMATANTIMAAHAGATHLSVTVNGLGERAGNAACEEVGAALEAGGIDTGLDLCALPELSAVVAKASGRAFRAQKPITGDDWLFAHESGIHVDAILKRADTYEDPRCAPARFGRERQIVIGKHSGSAGLRAALLEAGLPADDAVLDRLKPLLRAHAVRVKRPVEAGDLRRMVARLARPSPRT

SEQ ID NO: 738 - protein, 520 aa, Xanthomonas oryzae pv. oryzae KACC10331
MNTTISNQTPHIRIFDTTLRDGEQSPGCSMTPQQKLVMARALDALGVDIIETGFPASSHSDREAVAMMGRELRRPTLAVLSRCLQADIETSARALETVANPRLHVFLSTSPLHREHKLRMSREQVLESVHRHVTLARGYIDDVEFSAEDATRTEEDFLAEVTRVAVAAGATTINLPDTVGFTTPEEIRGMFSRLIASVEGADKVIFSAHCHNDLGLAVANSLAAIEGGARQVECTINGIGERAGNCALEEITMALKVRGAFYNIDSAINTPRIVSTSQLLQRLVGMPVQRNKAVVGGNAFAHESGIHQHGMLRHRGTYEIMRPEDVGWESSQMVLGRHSGRAAVERRLRALGYLLEEEEVKLMFEQFKALCEKQRLVTDADLQALMQDATVQEGYRLASMTISDVGSRANALVELSDPEGNRVAETAQGNGPVDALFGALASATGVKLELDSYQVHSVGIGADARGEASLSVRHDGVEYEGTGTSKDIIEASALAWLDVANRLLRQRERGVIAGKTAAVA

SEQ ID NO: 739 - protein, 623 aa, Brassica oleracea
MASSILRNPMLSSPTTITTPSLPSFSSKPSPLSFRFPPSHHRSSLRIKSLRLSCSLSDPSPPLRRCRPEYIPNRISDPNYVRVFDTTLRDGEQSPGATLTSKEKLDIARQLAKLGVDVIEAGFPAASKDDFEAVKTIAETVGNAVDGDGYVPVICGLSRCNKRDIETAWEAVKYAKRPRIHTFIATSDIHLEYKLKKSKDEVIEFARNMVKFARSLGCEDVEFSPEDAGRSEREFLYQILGEVIKAGATTLNIPDTVGITLPSEFGQLIADIKANTPGIENVIISTHCQNDLGLSTANTLSGAHSGARQVEVTINGIGERAGNASLEEVVMAIKCRGDHVLGGLYTGIDTRHIVMTSKMVEDYTGMQTQPHKAIVGANAFAHESGIHQDGMLKHKGTYEIICPEEIGLERSNDAGIVLGKLSGRHALKDRLTELGYVLDDEQLSSIFWRFKSVAERKKRVTDADIIALVSDEVFQPEALWKLLDIQITCGTLGLSTATVKLADADGKEHVACSMGTGPVDSAYKAVDLIVKEPATLLEYSMNAVTEGIDAIATTRVLIRGNNNYSTTNAITGEEVQRTFSGTGAGMDIVVSSVKAYVGALNKMLDFKENTTTKIPSQNNKVPA

SEQ ID NO: 740 - protein, 519 aa, Buchnera aphidicola
MKSKVVIFDTTLRDGEQALQASLSVKEKLQIALSLEKCGIDILEIGFPVSSPGDFKSVQTISKNIKNSRICSLARCIEKDIDAAGEAMSSSDSFRIHIFLATSTLHMESKLKKNFNEIIDMAVFSVKKALRYTDDIEFSCEDATRTTMDNLCRIVETLIKSGVKTINIPDTVGYTVPNELSCIIKNLLERVPNIHKSIISVHCHDDLGMAVGNSISAIQAGARQIEGTINGIGERAGNTALEEIIMAIKVREDILSVSTNINYKEIYRTSKIVSQICNMPIPSNKAIVGSNAFAHSSGIHQDGVLKNRKNYEIMEPSSIGLKEVKLNLTSRSGRAAVKHYMDEMGYNNSDYNIDELYIAFLKLADKKGQVFDYDLEALAFINKQQDEWEYFSLKFFSVQSISNSLSTASVKLLCGKKTYTESSTTSNGPVDAIYQALNRIACFPIILQKFQLVAKGKGKDALGQVDILVEHKKRKFHGVGLATDIIEASAQAMINVLNNIWKAKQVNKKLKILKDFKKK

SEQ ID NO: 741 - protein, 305 aa, Antirrhinum majus
MLEYDWGNPSSIILSGEEIPPDPEQTRQDNFDPYSANTNFSQTPHFINNPQTHFTAPNTHHQQYPFHPNFYDPYNPGSTLGLEPADPTGFMTIPKTEPAVGGGFEFNSRIGLNLGGRTYFASSEDDFVNRLYRRSRLLEPGSINAPRCQAEGCNADLSHCKHYHRRHKVCEFHSKAANVVAAGLTQRFCQQCSRFHVLSEFDNGKRSCRRRLADHNRRRRKSSQQANSQENSGKSQLQGNNAAAPNSSSENLPRSPPDSGAHSSSVTAGVSPPRISLDCFGHRPYSGGATSSSTASTTSLFYSNE

SEQ ID NO: 742 - protein, 515 aa, Vibrio fischeri ES114
MSDQVIIFDTTLRDGEQALSASLTVKEKLQIAYALERLGVDVIEAGFPVSSPGDFESVKTIAQHIKNSRICGLSRAVAKDIDAAAEALKVAEAFRIHTFISTSTVHVQDKLRRSYDDVVEMGVKAVKHARKYTDDVEFSCEDAGRTPIDNLCRMVEAAIDAGANTINIPDTVGYTVPGEFGGIVQTLFNRVPNIDKAIISVHCHDDLGMSVANSIAAVQAGARQVEGTINGIGERAGNCSLEEIAMILKTRSEYLGVHTNLKHDEIHRTSKLVSQLCNMPIQSNKAIVGANAFSHSSGIHQDGMLKNKNTYEIMTPESIGLKNQALNLTSRSGRAAVKSHMDEMGYKEDEYNLDTLYADFVKLADRKGQVFDYDLEALMHFANLRDEDDFYKLNYLSVQSGSVMATTSIKLLCGDEEKCEAAVGNGPVDALYQCIYKLTGYDIVLDKFDLTAKGEGEDGLGQADIIANYKGRKYHGTGLATDIIEASGQALLHVINSIHRADQIAEIKQKKVETV

SEQ ID NO: 743 - protein, 517 aa, Neisseria gonorrhoeae FA 1090
MTQANRVIIFDTTLRDGEQSPGAAMTKEEKIRVARQLEKLGADIIEAGFAAASPGDFEAVNAIAKTITKSTVCSLSRAIERDIRQAGKAVAPAPKKRIHTFIATSPIHMEYKLKMKPKQVIEAAVKAVKIAREYTDDVEFSCEDALRSQIDFLAEICGAVIEAGATTINIPDTVGYSIPYKTEEFFRELIAKTPNGGKVVWSAHCHNDLGLAVANSLAALKGGARQVECTVNGLGERAGNASVEEIVMALKVRHDLFGLETGIDTTQIVPSSKLVSTITGYPVQPNKAIVGANAFSHESGIHQDGVLKHRETYEIMSAESVGWSANRLSLGKLSGRNAFKTKLADLGIELESEEALNAAFARFKELADKKREIFDEDLHALVSDEMGNMNAESYKFISQKISTETGEEPRADIVFGIKGEEKRASATGSGPVDAIFKAIESVAQSGATLQIYSVNAVTQGTESQGETSVRLARGNRVVNGQGADTDILAATAKAYLSALSKLEFSAAKPKAQGSGTI

SEQ ID NO: 744 - protein, 500 aa, Bacteroides fragilis NCTC 9343
MDTTLRDGEQTSGVSFVPHEKLMIARLLLEELKVDRVEVASARVSDGEFDAVKMICDWAARRNLLQKVEVLGFVDGHTSLDWIHATGCRVINLLCKGSLKHCTCQLKKTPEKHIEDILAVVDYANELDIEVNVYLEDWSNGMKDSPEYVFRIVDALKETTIKRFMLPDTLGILNPLQVIEFMRKMKKRYPDTHFDFHAHNDYDLAVSNVLAAVLSGVKGLHTTINGLGERAGNAPLASVQAILKDHFNAITNIDESRLNDVSRVVESYSGIVIPANKPIVGENVFTQVAGVHADGDNKSNLYCNDLLPERFGRVREYALGKTSGKANIRKNLESLGLELDEESMKKVTERIIELGDKKELVTQEDLPYIISDVLKHDGMSNKVKLKSYFVTLAHGLKPMATLSIEIDGQVYEESSSGDGQYDAFVRALRKIYKVTLGRKFPMLINYAVSIPPGGRTDAFVQTVITWSFGEKVFRTRGLDADQTEAAIKATIKMLNIIEEY

SEQ ID NO: 745 - protein, 386 aa, Xylella fastidiosa
IARELRRPTLAVLSRCLQADIETSARALESATKPRLHVFLSTSPLHREHKLRMSKEQVLESVHKHVSLSRTLIDDVEFSAEDATRTEEDFLIEVTRVAIAAGATTINLPDTVGFSTPEEIRNMFTRVIANVEGANKVIFSAHCHDDLGLAVANSLAAIEGGARQIECTINGIGERAGNCALEELTMVLKVRNAFYNIDTSIHTSRIVSTSQLLQRLVGMPVQRNKAVVGANAFAHESGIHQHGMLRHRGTYEIMRPQEVGWVCSHMVLGRHSGRTAVEQRLRALGYLLEEEDLKLVFEEFKQLCEKQRLVTDVDLQVLMQDTTVQHGYRLASMTISDVGNQANALVELSNPQGQRVAETAQGNGPVDALFGALAAATGVKLELDSY

SEQ ID NO: 746 - protein, 150 aa, Zea mays subsp. parviglumis
MDWDLKAAGAWDLAELEQDHAAAAPSSGGHAANAAAAGTGTDSRPPAPGAAGAPAECSVDLKLGGMGECEPGAARREREAAAGAAKRPRPAGPGGQQQQQCPSCAVDGCRADLGKCRDYHRRHKVCEAHSKTPVVVVAGREMRFCQQCSR

SEQ ID NO: 747 - protein, 150 aa, Zea mays subsp. parviglumis
MDWDLKAAGAWDLAELEQDHAAAAPSSGGHAANAAAAGTGTESRPPAPGAAGAPAECSVDLKLGGMGECEPGAVRREREAAAGAAKRPRPAGPGGQQQQQCPSCAVDGCRADLGKCRDYHRRHKVCEAHSKTPVVVVAGREMRFCQQCSR

SEQ ID NO: 748 - protein, 150 aa, Zea mays subsp. parviglumis
MDWDLKAAGAWDLAELEQDHAAAAPSSGGHAANAAAAGTGTESRPPAPGAAGAPAECSVDLKLGGMGECEPGAARREREAAAGAAKRPRPAGPGGQQQQQCPSCAVDGCRADLGKCRDYHRRHKVCEAHSKTPVVVVAGREMRFCQQCSR

SEQ ID NO: 749 - protein, 150 aa, Zea mays subsp. parviglumis
MDWDLKAAGAWDLAELEQDHAAAAPSSGGHAANAAAAGTGTESRPPAPGAAGAPAECSVDLKLGGMGECEAGAARREREAAAGAAKRPRPAGPGGQQQQQCPSCAVDGCRADLGKCRDYHRRHKVCEAHSKTPVVVVAGREMRFCQQCSR

SEQ ID NO: 750 - protein, 150 aa, Zea mays subsp. parviglumis
MDWDLKAAGAWDLAELEQDHAAAAPSSGGHAANAAAAGTGTESRPPAPGAAGAPAVCSVDLKLGGMGECEAGAARREREAAAGAAKRPRPAGPGGQQQQQCPSCAVDGCRADLGKCRDYHRRHKVCEAHSKTPVVVVAGREMRFCQQCSR

SEQ ID NO: 751 - protein, 150 aa, Zea mays subsp. parviglumis
MDWDLKAAGAWDLAELEQDHAAAAPSSGGHASNAAAAGTGTESRPPAPGAAGAPAECSVDLKLGGMGECEPGAARREREAAAGAAKRPRPAGPGGQQQQQCPSCAVDGCRADLGKCRDYHRRHKVCEAHSKTPVVVVAGREMRFCQQCSR

SEQ ID NO: 752 - protein, 150 aa, Zea mays subsp. parviglumis
MDWDLKAAGAWDLAELEQDHAAAAPSSGGHAANAAAAGTGTESRPPAPGAAGAPAECSVDLKLGGMGECDPGAARREREAAAGAAKRPRPAGPGGQQQQQCPSCAVDGCRADLGKCRDYHRRHKVCEAHSKTPVVVVAGREMRFCQQCSR

SEQ ID NO: 753 - protein, 150 aa, Zea mays subsp. parviglumis
MDWDLKAAGAWDLAELEQDHAAAAPSSGGHAANAAAAGTGTESRPPAPGAAGAPAECSVDLNLGGMGECEPGAARREREAAAGAAKRPRPAGPGGQQQQQCPSCAVDGCRADLGKCRDYHRRHKVCEAHSKTPVVVVAGREMRFCQQCSR

SEQ ID NO: 754 - protein, 150 aa, Zea mays subsp. mexicana
MDWDLKAAGAWDLAELEQDHAAAAPSSGGHAANAAAAGTGTESRPPAPGAAGAPAECSVDLKLGGMGECEPGAARRERETAAGAAKRPRPAGPGGQQQQQQCPSCAVDGCRADLGKCRDYHRRHKVCEAHSKTPVVVVAGREMRFCQQCS

SEQ ID NO: 755 - protein, 150 aa, Zea mays subsp. mexicana
MDWDLKAAGAWDLAELEQDHAAAAPSSGGHAANAAAAGTGTESRPPAPGAAGAPAECSVDLKLGGMGECEPGAARREREAAAGAAKRPRPAGPGGQQQQQQCPSCAVDGCRADLGKCRDYHRRHKVCEAHSKTPVVVVAGREMRFCQQCS

SEQ ID NO: 756 - protein, 150 aa, Zea diploperennis
MDWDLKAAGAWDLAELEQDHAAAAPSSGGHAANAAAAGTGTESRPPAPGAAGAPAECSVDLKLGGMGECEPGAARREREVVAGAAKRPRPAGPGGQQQQQCPSCAVDGCRADLGKCRDYHRRHKVCEAHSKTPVVVVAGREMRFCQQCSR

SEQ ID NO: 757 - protein, 406 aa, Xylella fastidiosa
QSDYEAMTLIARELRRPTLAVLSRCLQADIETSARALESATKPRLHVFLSTSPLHREHKLRMSKEQVLESVHKHVSLSRTLIDDVEFSAEDATRTEEDFLIEVTRVAIAAGATTINLPDTVGFSTPEEIRNMFTRVIANVEGANKVIFSAHCHDDLGLAVANSLAAIEGGARQIECTINGIGERAGNCALEELTMVLKVRNAFYNIDTSIHTSRIVSTSQLLQRLVGMPVQRNKAVVGANAFAHESGIHQHGMLRHRGTYEIMRPQEVGWVCSHMVLGRHSGRAAVEQRLRALGYLLEEEDLKLVFEEFKQLCEKQRLVTDVDLQVLMQDTTVQHGYRLASMTISDVGNRANALVELSDPQGQRVAETAQGNGPVDALFGALAAATGVKLELDSYQVHSVGIGADA

SEQ ID NO: 758 - protein, 396 aa, Xylella fastidiosa
LIARELRRPTLAVLSRCLQADIETSARALESATKPRLHVFLSTSPLHREHKLRMSKEQVLESVHKHVSLSRTLIDDVEFSAEDATRTEEDFLIEVTRVAIAAGATTINLPDTVGFSTPEEIRNMFTRVIANVEGANKVIFSAHCHDDLGLAVANSLAAIEGGARQIECTINGIGERAGNCALEELTMVLKVRNAFYNIDTSIHTSRIVSTSQLLQRLVGMPVQRNKAVVGANAFAHESGIHQHGMLRHRGTYEIMRPQEVGWVCSHMVLGRHSGRAAVEQRLRALGYLLEEEDLKLVFEEFKQLCEKQRLVTDVDLQVLMQDTTVQHGYRLASMTISDVGNRANALVELSDPQGQRVAETAQGNGPVDALFGALAAATGVKLELDSYQVHSVGIGA

SEQ ID NO: 759 - protein, 406 aa, Xylella fastidiosa
QSDYEDMTLIARELRRPTLAVLSRCLQADIETSARALESATKPRLHVFLSTSPLHREHKLRMSKEQVLESVHKHVSLSRTLIDDVEFSAEDATRTEEDFLIEVTRVAIAAGATTINLPDTVGFSTPEEIRNMFTRVIANVEGANKVIFSAHCHDDLGLAVANSLAAIEGGARQIECTINGIGERAGNCALEELTMVLKVRNAFYNIDTSIHTSRIVSTSQLLQRLVGMPVQRNKAVVGANAFAHESGIHQHGMLRHRGTYEIMRPQEVGWVCSHMVLGRHSGRAAVEQRLRALGYLLEEEDLKLVFEEFKQLCEKQRLVTDVDLQVLMQDTTVQHGYRLASMTISDVGNRANALVELSDPQGQRVAETAQGNGPVDALFGALAAATGVKLELDSYQVHSVGIGADA

SEQ ID NO: 760 - protein, 406 aa, Xylella fastidiosa
QSDYEAMTLIARELRRPTLAVLSRCLQADIETSARALESATKPRLHVFLSTSPLHREHKLRMSKEQVLESVHKHVSLSRTLIDDVEFSAEDATRTEEDFLIEVTRVAIAAGATTINLPDTVGFSTPEEIRNMFTRVIANVEGANKVIFSAHCHDDLGLAVANSLAAIEGGARQIECTINGIGERAGNCALEELTMVLKVRNAFYNIDTSIHTSRIVSTSQLLQRLVGMPVQRNKAVVGANAFAHESGIHQHGMLRHRGTYEIMRPQEVGWVCSHMVLGRHSGRAAVEQRLRALGYLLEEEDLKLVFEEFKQLCEKQRLVTDVDLQVLMQDTTVQHGYRLASMTISDVGNQANALVELSNPQGQRVAETAQGNGPVDALFGALAAATGVKLELDSYQVHSVGIGADA

SEQ ID NO: 761 - protein, 395 aa, Xylella fastidiosa
IARELRRPTLAVLSRCLQADIETSARALESATKPRLHVFLSTSPLHREHKLRMSKEQVLESVHKHVSLSRTLIDDVEFSAEDATRTEEDFLIEVTRVAIAAGATTINLPDTVGFSTPEEIRNMFTRVIANVEGANKVIFSAHCHDDLGLAVANSLAAIEGGARQIECTINGIGERAGNCALEELTMVLKVRNAFYNIDTSIHTSRIVSTSQLLQRLVGMPVQRNKAVVGANAFAHESGIHQHGMLRHRGTYEIMRPQEVGWVCSHMVLGRHSGRAAVEQRLRALGYLLEEEDLKLVFEEFKQLCEKQRLVTDVDLQVLMQDTTVQHGYRLASMTISDVGNQANALVELSNPQGQRVAETAQGNGPVDALFGALAAATGVKLELDSYQVHSVGIGA

SEQ ID NO: 762 - protein, 397 aa, Xylella fastidiosa
IARELRRPTLAVLSRCLQADIETSARALESATKPRLHVFLSTSPLHREHKLRMSKEQVLESVHKHVSLSRTLIDDVEFSAEDATRTEEDFLIEVTRVAIAAGATTINLPDTVGFSTPEEIRNMFTRVIANVEGANKVIFSAHCHDDLGLAVANSLAAIEGGARQIECTINGIGERAGNCALEELTMVLKVRNAFYNIDTSIHTSRIVSTSQLLQRLVGMPVQRNKAVVGANAFAHESGIHQHGMLRHRGTYEIMRPQEVGWVCSHMVLGRHSGRAAVEQRLRALGYLLEEEDLKLVFEEFKQLCEKQRLVTDVDLQVLMQDTTVQHGYRLASMTISDVGNRANALVELSNPQGQRVAETAQGNGPVDALFGALAAATGVKLELDSYQVHSVGIGADA

SEQ ID NO: 763 - protein, 387 aa, Xylella fastidiosa
LIARELRRPTLAVLSRCLQADIETSARALESATKPRLHVFLSTSPLHREHKLRMSKEQVLESVHKHVSLSRTLIDDVEFSAEDATRTEEDFLIEVTRVAIAAGATTINLPDTVGFSTPEEIRNMFTRVIANVEGANKVIFSAHCHDDLGLAVANSLAAIEGGARQIECTINGIGERAGNCALEELTMVLKVRNAFYNIDTSIHTSRIVSTSQLLQRLVGMPVQRNKAVVGANAFAHESGIHQHGMLRHRGTYEIMRPQEVGWVCSHMVLGRHSGRAAVEQRLRALGYLLEEEDLKLVFEEFKQLCEKQRLVTDVDLQVLMQDTTVQHGYRLASMTISDVGNRANALVELSNPQGQRVAETAQGNGPVDALFGALAAATGVKLELDSY

SEQ ID NO: 764 - protein, 406 aa, Xylella fastidiosa
QSDYEAMTLIARELRRPTLAVLSRCLQADIETSARALESATKPRLHVFLSTSPLHREHKLRMSKEQVLESVHKHVSLSRTLIDDVEFSAEDATRTEEDFLIEVTRVAIAAGATTINLPDTVGFSTPEEIRNMFTRVIANVEGANKVIFSAHCHDDLGLAVANSLAAIEGGARQIECTINGIGERAGNCALEELTMVLKVRNAFYNIDTSIHTSRIVSTSQLLQRLVGMPVQRNKAVVGANAFAHESGIHQHGMLRHRGTYEIMRPQEVGWVCSHMVLGRHSGRTAVEQRLRALGYLLEEEDLKLVFEEFKQLCEKQRLVTDVDLQVLMQDTTVQHGYRLASMTISDVGNQANALVELSNPQGQRVAETAQGNGPVDALFGALAAATGVKLELDSYQVHSVGIGADA

SEQ ID NO: 765 - protein, 175 aa, Betula platyphylla
MNLGKVDGSCYQKMVKKEAEEDQVSDEELVESGVEEEKKKKGVVGSGGKRCCQAEKCTADLSDGKQYHKRHKVCEHHAKAQVVLVGGMRQRFCQQCSRFHELSEFDETKRSCRRRLAGHNERRRENTAESHAEGSSRKGTGTHQLKDIVCGQVDDRGRIQITIHENSTYKHFQIR

SEQ ID NO: 766 - protein, 216 aa, Illicium floridanum
KRIENTTNRQVTFCKRRNGLLKKAYELSVLCDAEVALIVFSTRGRLYEYANNSVKGTIERYKKACTDTSNSGCITEANSQYYQQESSKLREQIGILQKANRHLMGDGISSMSIKELKQLENRLEKGIGKIRTKKNELLYAEIEYMQKRETDLQKDNMYLRAKITENERAQQHMNMLPGPEYDMMPQFDSRNFLQVNLLEPSHHQYSHQEQTTLQLG

SEQ ID NO: 767 - protein, 394 aa, uncultured bacterium
MDNVRIFDTTLRDGEQSPGFSMTVPEKVRLARQIESLGVDIIESGFPISSAGDLEGVRAVAREIRGCTVAALARARKQDIDVALDGLSEAKHPRLHTFLATSDLHLQTKLRMTREQALEAISTNVRYARERCAEVEFSAEDASRSDMDYLCQAVGAAVKAGATIINLPDTVGYAVPEEYSAMFRRVIAFLDGAEGVTLSAHCHNDLGLGVANSLAAIQGGARQLELTINGIGERAGNAALEEVAVLLRVRQASLGVTTNLHIEKLYATSRMLSEITGVPVAPNKAVVGANAFAHEAGIHQDGILKNPLTYEIISPEAVGVPKRQLVLGKHSGRNALRSALVEFGYDPSAEELDECYKRVSVLADQSKNVSNRDLLAIAHQVMRKRGSETAIAAE

SEQ ID NO: 768 - protein, 218 aa, Ipomoea batatas
MGRGKVEIRRIEKSTNRRVTFWKRRNGLLKKAMEMGILCDAEVGLMIFSSTGKLHEFATTSIRSVIERYNKTQGDGLQSPLDPTLELKFWQIKVAILRKQLHNMQEDHRKAMGEVYGLSVKDLLNLENQLEMSMSSIIMKKEQLLIDQILELTHQQRSIVLQENFELFNKFQAYGTSDPNAVNGDTISPYDFTISEESQGHIHFQLPQNFSDLARALY

SEQ ID NO: 769 - protein, 108 aa, Betula platyphylla
HKRHKVCEHHPKAQVVLVGGMRQRFCQQCSRFHELSEFDETKRSCRRRLAGHNERRRKNTAESHAEGSSRKGTGTHQLKDIVCGQVDDRGRIQITIHENSTYKHFQIR

SEQ ID NO: 770 - protein, 428 aa, Saccharomyces cerevisiae
MTAAKPNPYAAKPGDYLSNVNNFQLIDSTLREGEQFANAFFDTEKKIEIARALDDFGVDYIELTSPVASEQSRKDCEAICKLGLKAKILTHIRCHMDDAKVAVETGVDGVDVVIGTSKFLRQYSHGKDMNYIAKSAVEVIEFVKSKGIEIRFSSEDSFRSDLVDLLNIYKTVDKIGVNRVGIADTVGCANPRQVYELIRTLKSVVSCDIECHFHNDTGCAIANAYTALEGGARLIDVSVLGIGERNGITPLGGLMARMIVAAPDYVKSKYKLHKIRDIENLVADAVEVNIPFNNPITGFCAFTHKAGIHAKAILANPSTYEILDPHDFGMKRYIHFANRLTGWNAIKARVDQLNLNLTDDQIKEVTAKIKKLGDVRSLNIDDVDSIIKNFHAEVSTPQVLSAKKNKKNDSDVPELATIPAAKRTKPSA

SEQ ID NO: 771 - protein, 440 aa, Saccharomyces cerevisiae
MSENNEFQSVTESTTAPTTSNPYGPNPADYLSNVKNFQLIDSTLREGEQFANAFFDTEKKIEIARALDDFGVDYIELTSPVASEQSRKDCEAICKLGLKAKILTHIRCHMDDARVAVETGVDGVDVVIGTSKFLRQYSHGKDMNYIAKSAVEVIEFVKSKGIEIRFSSEDSFRSDLVDLLNIYKTVDKIGVNRVGIADTVGCANPRQVYELIRTLKSVVSCDIECHFHNDTGCAIANAYTALEGGARLIDVSVLGIGERNGITPLGGLMARMIVAAPDYVRSKYKLHKIRDIENLVADAVEVNIPFNNPITGFCAFTHKAGIHAKAILANPSTYEILDPHDFGMKRYIHFANRLTGWNAIKSRVDQLNLNLTDDQIKEVTAKIKKLGDVRPLNIDDVDSIIKDFHAELSTPLLKPVNKGTDDDNIDISNGHVSKKAKVTK

SEQ ID NO: 772 - protein, 500 aa, Bacillus anthracis str. A2012
MDTTLRDGEQSPGVNLNEQEKLQIARQLERLGIHVMEAGFAAASEGDFQSVKRIANTIQNATVMSLARAKESDIRRAYEAVKGAVSPRLHVFLATSDIHMKYKLCMSKEDVLDSIYRSVTLGKSLFPTVQFSAEDATRTARDFLAEAVEVAIRAGANVINIPDTVGYTNPEEYYALFKYLQESVPSYEKAIFSCHCHDDLGMAVANSLAAVEGGALQVEGTINGIGERAGNAALEEVAVALHIRKDFYKAEPSMTLKEIKATSTLVSRLTGMVVSKNKAIVGANAFAHESGIHQDGVLKEVTTYEIIEPALVGESQNLFVLGKHSGRHAFTEKMKELGYEFTNDERDAVFEAFKKLADRKKEITEEDLRALMLGEAAFAAQQYNITQLQVHFVSNSTQCATVVLKDEEGNVFEDAATGSGSIEAIYNAIQRILGLECELADYRIQSITQGQDALAHVHVELKEGAHQVSGFGVAQDVLEASARAYVHAAGKLKSFIQLVK

SEQ ID NO: 773 - protein, 531 aa, Nostoc sp. PCC 7120
MTTKPEKIIIFDTTLRDGEQCPGATLNIDEKLAIAKQLARLGVDIIEAGFAFASPGDFEAVHKIAQTVGTQSGPVICSLARARHDDIKAAAEAIKPAAKGRIHTFIATSDIHLQYKLKKTRPEVIAIAEEMVAYAKSFTDDVEFSPEDAGRSDPEFLYQVLERAIAAGATTINIPDTVGYTTPSEFGAIIKGIKENVPNIDQAIISVHGHNDLGLAVANFLEAVKNGARQLECTINGIGERAGNAALEELVMAMHVRRQYFNPFLGRHPDSEEALTNIDTKQIYKTSRLVSNLTGMLVQPNKAIVGANAFAHESGIHQDGVLKNKLTYEIMDAQLIGLTDNQIVLGKHSGRNAFRTRLKELGFELSETELNKAFVKFKEVADKKKEISDWDLEAIVNDEIQQAPDLFRVELVQVSAVAMHVQPATVTLRTPDGEELTDAAIGTGPVDAVYKAINRVVNVPNQLIEFSVQSVTAGIDAIGEVTIRLRYESRVFSGHAANTDIIVASAQAYVNALNRLYASLQTQDKQTEVTA

SEQ ID NO: 774 - protein, 235 aa, Musa acuminata
MGRGKIEIKRIENTTNRQVTFCKRRNGLLKKAYELSVLCDAEVALIVFSSRGRLYEYANNNIKSTIERYKKACADSSSSDAIVDVNSQHYYQQESAKLRHQIQVLQNANRHLMGDALSSLNVKELKQLENRLERSITRIRSKKHELLFAEIEYMQKREVELQSDNMYPRAKIAENERVQQLSIVEAGAEYDAIPGAFDSRNYYHANILEAAAHYSHHQDQTALQLGYETKADSAA

SEQ ID NO: 775 - protein, 445 aa, Aspergillus nidulans FGSC A4
MCPGDHPGFTAVQTRQNPHPSRNPYGHNVGVTDFLSNVSRFKIIESTLREGEQFANAFFDTQKKIEIAKALDEFGVDYIELTSPCASEQSRLDCEAICKLGLKAKILTHIRCHMDDARVAVETGVDGVDVVIGTSSYLREHSHGKDMTYIKNTAIEVIEFVKSKGIEIRFSSEDSFRSDLVDLLSIYSAVDQVGVNRVGIADTVGCASPRQVYELIRVLRGVVSCDIETHFHNDTGCAIANAYCALEAGATHIDTSVLGIGERNGITPLGGLMARMMVADPQYVKSKYKLEKLKDIEDLVAEAVEVNIPFNNYITGFCAFTHKAGIHAKAILNNPSTYEIINPADFGMSRYVHFASRLTGWNAIKSRAQQLNVHMTDDQYKECTAKIKALADIRPIAIDDADSIIRAYYRNLSSGENKPLMDLTADEHAQFLAKEKELTESGTAL

SEQ ID NO: 776 - protein, 377 aa, Crocosphaera watsonii WH 8501
MTNIHINDTTLRDGEQAAGIVFSAAEKIAIASMMDSMGIPELEVGIPAMGGSEAQAITTIVQKGLKAKLLGWNRAVRSDIEASIACGLKRVHISVPVSEIQIKAKFKGKTNLVWQRLKDSLNFALDQDLFVSVGAEDASRADESFLLEVAQFAQSLGASRFRFCDTVGILEPLTTAQKVGKLVECLKIPIEMHTHNDFGLATANALAGLQAGATAVNTTVNGLGERAGNAALEEMIMALKRLYQVDLAIETSRLRELSQQVIAASGIALPPWKAIVGDNVFAHESGIHAHGVLENPQTYEPFSPDEVGWKRRLVVGKHSGRHLLTNVLSQHGIRLNHEESQVVLDSVRHLSVQMKRSLTVEELLYVVSNRSMSHGIV

SEQ ID NO: 777 - protein, 537 aa, Crocosphaera watsonii WH 8501
MSNQTDRIIIFDTTLRDGEQSPGASLTVEEKLTIARALARLGVDIIEAGFPYASPGDFQAVQKIAETVGTENGPRICGLARASTKDIKAAGEALKPAFKSRIHTFIATSDIHLKHKLKKTRSEVLDIVPEMVAYAKTFTDDIEFSPEDAGRSDPEFMYQVLETAIAAGATTVNIPDTVGYTTPSEFGAIIKGIKDNVPNIDQAIISVHGHDDLGLAVANFLEAVKNGARQLECTINGIGERAGNAALEELVMALHVRRQYFNPFLGRAVDSTEPLTNINTQEIYKTSRLVSNLTGMIVQPNKAIVGANAFAHESGIHQDGVLKNKLTYEIMDAESIGLTNNQIVLGKLSGRNAFRTRLSELGFELSDNDLNNAFLRFKEVADKKKEITDWDLEAIVNDEIQQAPELFRLELVQVSCGDHAVSTATVTLRNPEGKELTDAAIGTGPVDAVYKAINRVVNVPNELIEFSVKSVTAGIDAMGEVTIRLRHEGRTYSGYAANTDIITASARAYISALNRLYGAIQEQSKVNSSEAVLTPQG

SEQ ID NO: 778 - protein, 230 aa, Beta vulgaris
  misc_feature (199)..(199): Xaa can be any naturally occurring amino acid
  misc_feature (212)..(212): Xaa can be any naturally occurring amino acid
  unsure (1)..(230): unsure at all Xaa locations
MGRGKIEIKRIENTTNRQVTFCKRRNGLLKKAYELSVLCDAEVALIVFSSRGRLYEYANHSVKGTIDRYKKACSNQSGAGSVAEANAQYYQQEAAKLRNQIRTATENNRLLSRHMMGEGLSSLSMKELKNLETKLERGISRIRSKKNELLFAEIEFMQKREIELHNNNQFLRARISENERAQQSMSLMPGGSDYDLVPXQSFDSRNYFQVNXLQPSSQYARQDQTPLQLV

SEQ ID NO: 779 - protein, 515 aa, Haemophilus influenzae 86-028NP
MTDRVIIFDTTLRDGEQALKASLTVKEKLQIALALERLGVDVMEVGFPVSSQGDFESVQTIARHIKNARVAALSRAVDKDIDAAYQALKVAEAFRIHTFIASSALHVEAKLKRSFDDVVGMAVAAVKRARNYTDDVEFSCEDAGRTGIDNICRIVEAAINAGATTVNIPDTVGFCLPNEYGNIIAQVRNRVPNIDKAVISVHCHNDLGMATANSLTAVQNGARQIECTINGIGERAGNTSLEEVVMAMKVRQDFMGVDTRINTQEIHRVSQMVSQLCNMPIQPNKAIVGSNAFAHSSGIHQDGMLKNKNTYEIMSPETIGLKKEKLNLTARSGRAAVKGHMADMGYNEQDYDLDKLYDAFLKLADKKGQVFDYDLEALAFIDMQQGDEDRLVLDKLSAHSTKEYPATAFVQLKLDGEKLSTSSIGGNGPVDAVYNAILNLTGLEIKMSHYNLTAKGEGAEALGQVDIVVEHKGRKFHGVGLATDIVESSALALVHAINAIYRAHKVADIKSHKHH

SEQ ID NO: 780 - protein, 428 aa, Candida albicans SC5314
MVDGYKEVSESFDRSKIQHNPYGPNPGDFLSNVGNFQLIESTLREGEQFANAFFSTETKIEIAKALDDFGVDYIELTSPVASEQSRKDCEAICKLGLKAKILTHIRCHMDDARVAVETGVDGVDVVIGTSQFLRQYSHGKDMNYIAQSAIEVIEFVKSKGIEIRFSSEDSFRSDLVDLLNIYRTVDKIGVNRVGIADTVGCANPRQVYELVRTLKSVVKCDIECHFHNDTGCAIANAYTALEGGARLIDVSVLGIGERNGITPLGGLMARMIAADREYVLSKYKVHKLRDIENLVAEAVQVNIPFNNPITGFCAFTHKAGIHAKAILANPSTYEILSPSDFGLTRYIHFANRLTGWNAIKSRVDQLNLHLTDEQCKEVTNKIKKLGDVRQLNIDDVDSIIKDFHADMSTPLLKSNGAEEEPDVKKQKV

SEQ ID NO: 781 - protein, 417 aa, Candida albicans SC5314
MSVASNPYGPNPSDFLSNVNKFEVIESTLREGEQFANAFFTTEKKIEIAKALDDFGVDYIELTSPVASEQSRRDCEAICKLGLKAKILTHIRCHMDDARVAVETGVDGVDVVIGTSQFLRQYSHGKDMNYIAQSAIEVIEFVKSKGIEIRFSSEDSFRSDIVDLLNIYRTVDKIGVNRVGIADTVGCANPRQVYELVKTLKSVVSCDIECHFHNDTGCAIANAYTALEAGAKLIDVSVLGIGERNGITPLGALMARMITADRDYVLSKYKLHKLRDLENLVADAVQINIPFNNPITGFCAFTHKAGIHAKAILANPSTYEILNPNDFGLTRYIHFANRLTGWNAIKSRVDQLNLHLTDDQVKEVTNKIKKLGDVRQLNIDDVDSIIKDFHAEQSTTNTPLLKPVEDDEGPEIKKQKV

SEQ ID NO: 782 - protein, 440 aa, Streptomyces hygroscopicus
MTVQNPQEPEYFPEVFPQDAFPQYAWDEGMRPITLPHEVWLSETTHRDGQQGGLPLSLDTSRRIYDILCEITGDSTAIRHAEFFPYRDSDRNALIYALERHRDGAPIEPTTWIRARREDVELIKRIGVIETGLLSSSSDYHTFHKFGSGGRTQAASMYLDAVTMALDHGIRPRVHLEDTTRSSPDFVRALVEEVLKTAERYPAELQPRFRVCDTLGIGLPYDDVSLPRSIPRWIRLLRGFGLSPSQIELHPHNDTWLVVANCLAAIREGCGVISGTTLGTGERTGNAPLEAVMVHLLGMGYWSGARVNLPAVNKLVELYEGIGAGPSQKYPFFGRDAYVTRAGIHADGLNKFWWMYAPFNAPLLTGRELDVALTKDSGQAGLLFVLNKRLGLQLEKGDPRVAEVLAWMDRQWDAGRVSAVEWSELEPVVEKAFATEEGVG

SEQ ID NO: 783 - protein, 447 aa, Ustilago maydis 521
MCDHSEPTPIQHVNGTAPDTHVAIDTSAPNTNGSVANGGVVARDNGNAGSVQPFNSRYSDFLSNVSNFKIIESTLREGEQFANAFFDTETKIKIAKALDKFGVDCIELTSPAASEQSRKDCEAICKLGLKAKVITHIRCHMDDARIAVETGVDGVDVVMGTSKFLREFSHGKDMTYITKTAIEVIQFVKSKGIEIRFSTEDSFRSDLVDLLSIYQAVDKVGVNRVGIADTVGVANPRQVYDLVRTLRGVVGCDIECHFHNDTGCAIANAYTALEAGATHVDTSVLGIGERNGIPSLGGFIARMYTADREYVMSKYNLKALREVENLVAEAVQIQVPFNNYVTGYCAFTHKAGIHAKAILANPSTYEIIRPEDFGMSRYVSIGHRLTGWNAVKSRCEQLELSLTEEQVKQVTAKIKQLADVREQTMEDVDSILRNYARAIENGSSVAA

SEQ ID NO: 784 - protein, 519 aa, Xylella fastidiosa Dixon
MNTGISSQPPCIRIFDTTLRDGEQSPGCSMPAQQKLVMARALDALGVDIIETGFPASSQSDYEAMTLIARELRRPTLAVLSRCLQADIETSARALESATKPRLHVFLSTSPLHREHKLRMSKEQVLESVHKHVSLSRTLIDDVEFSAEDATRTEEDFLIEVTRVAIAAGATTINLPDTVGFSTPEEIRNMFTRVIANVEGANKVIFSAHCHDDLGLAVANSLAAIEGGARQIECTINGIGERAGNCALEELTMVLKVRNAFYNIDTSIHTSRIVSTSQLLQRLVGMPVQRNKAVVGANAFAHESGIHQHGMLRHRGTYEIMRPQEVGWVCSHMVLGRHSGRAAVEQRLRALGYLLEEEDLKLVFEEFKQLCEKQRLVTDVDLQVLMQDTTVQHGYRLASMTISDVGNQANALVELSNPQGQRVAETAQGNGPVDALFGALAAATGVKLELDSYQVHSVGIGADARGEANLSVRHNDTQYEGTGTSKDIIEASALAWLDVANRLLRNPENMQNKQNTALA

SEQ ID NO: 785 - protein, 526 aa, Colwellia psychrerythraea 34H
MSNPQINNDQVIIFDTTLRDGEQALNASLSVHEKLQIALAIERLGVDVMEVGFPVSSPGDFESVQQIARTIKNARVCGLARAVEADIDACAEALKVADQFRIHTFISTSDVHVQQKLKKEFSDVEAMAIHAVKHARKYTDDVEFSCEDAGRTPIDNLCRMVEGAIKAGATTVNIPDTVGYTLPFEFQGIITDLFNRVPNIDQAIISVHCHNDLGLAVANSMAAVQAGARQIECTINGIGERAGNCSLEEVAMIMQTRQALLGVKTNINHQEIARVSKLVSTVCNMPVQLNKAIVGGNAFSHSSGIHQDGMLKASNTYEIMTPESVGIAKTKLNLTSRSGRHVIKHRMESLGYQESDYEIEELYADFLTLADKKGQVFDDDLEALVFKLQQKDLQDFFQLDTINVQCGDGEFSTASIKLISGEVTGDKENSKTHAATGNGPVDALYQAIKQSVDIEFEVSDYKISNKGSGEDGLGQADLIIIWQGRNFHGYGLETDVIEASGQALINALNSIHRAMTIADLKSAKQA

SEQ ID NO: 786 - protein, 519 aa, Xylella fastidiosa Ann-1
MNTSISSQPPCIRIFDTTLRDGEQSPGCSMPAQQKLVMARALDALGVDIIETGFPASSQSDYEAMTLIARELRRPTLAVLSRCLQADIETSARALESATKPRLHVFLSTSPLHREHKLRMSKEQVLESVHKHVSLSRTLIDDVEFSAEDATRTEEDFLIEVTRVAIAAGATTINLPDTVGFSTPEEIRNMFTRVIANVEGANKVIFSAHCHDDLGLAVANSLAAIEGGARQIECTINGIGERAGNCALEELTMVLKVRNAFYNIDTSIHTSRIVSTSQLLQRLVGMPVQRNKAVVGANAFAHESGIHQHGMLRHRGTYEIMRPQEVGWVCSHMVLGRHSGRAAVEQRLRALGYLLEEEDLKLVFEEFKQLCEKQRLVTDVDLQVLMQDTTVQHGYRLASMTISDVGNRANALVELSDPQGQRVAETAQGNGPVDALFGALAAATGVKLELDSYQVHSVGIGADARGEANLSVRHNDTQYEGTGTSKDIIEASALAWLDVANRLLRNPENMQNKQNTALA

SEQ ID NO: 787 - protein, 378 aa, Dechloromonas aromatica RCB
MQQPFITINDTTLRDGEQSAGVAFSLDEKLDIARQLAAIGVPELEVGIPAMGDEERDSIRAVADLQLAPRLMVWSRMHPTDIAACAGLGAHLIDISVPASDQHLAYKLKQDRAWLLRELPKFIGAALSLGLEVGLGCEDASRADMNFLCALAETAERAGARRLRFADTLGILEPFGTFDRISTLRRNTGLEIEMHAHDDMGLATANTLAACKAGATHVNTTVNGLGERAGNAPLEEVVLGLTKLYGIETNVSLKGFPSLSAKVASASGRAIPWQKSVVGAGAFTHEAGIHVDGLLKHPDNYQGFDPREVGQSHRIVLGKHSGSRAVQVVYAGLGFELGETEAQAMLPRVRTFVAEHKHPPEVSDLRDLLSSLRSNLHV

SEQ ID NO: 788 - protein, 513 aa, Dechloromonas aromatica RCB
MKQHLVIFDTTLRDGEQSPGASMTKEEKIRVARQLEKMRVDVIEAGFAAASPGDFDAIHSIAQTIKDSTVCSLARANENDIRRAGEAIKPAQSGRIHTFIATSPIHMEKKLRMTPDQVVEQAVKAIGWAREYTDDIEFSAEDAGRSDLDFLCRIFEEVIKAGATTINVPDTVGYNIPSQYAETMRQLIERVPNSDKVVWSVHCHNDLGLAVSNSLAAVLCGARQVECTINGLGERAGNAALEEIVMAVRTRADVFPVETRIDTTQIVPASKLVSQITGYPVQPNKAVVGANAFAHESGIHQDGVLKHRETYEIMRAQDVGWTQNKLVLGKHSGRNAFKNRLQELGIELESDEALNAAFARFKELADKKHEIFDEDLHALVSDDLVTPDQEYYKLVYSRVCSETGEMPRASVILNIGGVEHKAEADGGGPVDATFKAIESIAGSGAELLLYSVNAITTGTDAQGEVTTRLSKGDRIVNGNGADTDIVIASARSYLNALNKLHSTLDKVKAQGGV

SEQ ID NO: 789 - protein, 539 aa, Prochlorococcus marinus str. NATL2A
MAKDPGRVLIFDTTLRDGEQSPGASLNLEEKLAIAQQLARLGVDVIEAGFPFASPGDFAAVQKIAENVGGEEGPIICGLSRASKPDIKACANAIAPAPKKRIHTFIATSDIHLEHKLRKSRKEVLDIVPDMVGYAKSFVDDVEFSCEDAARSDLDFLYEVIELAISSGANTINIPDTVGYITPSEFGDLILNINKNVPNINEAVLSVHGHNDLGLAVANFLEAVKNGARQLECTINGIGERAGNAALEELIMALHVRRSYFNPFFGRPPESPTPLTAVRTEEITKSSRLVSNLTGMVVQPNKAIVGANAFAHESGIHQDGVLKNRLTYEIIDAKTVGLSDNKISLGKLSGRSAVRARLEDLGYDLNREDLNDAFARFKDLADRKREITDRDLEAIVSEQVQLPEALFQLKLVQVSCGTSLMPTATVTVVGEDGEEKTAVSLGTGPVDAVVRALDSLTEEPNELIEFSVKSVTEGIDALGEVTIRIRRDGNLFSGHSADTDVVVAAAQAYINALNRLVAAHGRKSIHPQHDLAKVEKKGI

SEQ ID NO: 790 - protein, 245 aa, Phalaenopsis amabilis
MGRGRVQLKRIENKINQQVTFSKRRSGLLKKAHEISVLCDADVALIIFSNKGKLCEYSTDSSMEKILERYEHYSYTERALYSNEDNPQADWRLEYNKMKAKVESLQKSQRHLMGEQLDYLSIKELQHLEQQLESSLKHIRSRKTQLMVDSISELQKKEKLLLEQNKTLQDMAKAKAKALVQNAAWEQQNKSQYSSEPPHAVISDSVPTPTSRTFQTRANGEESPQPQLRLGNSLLPPWMLSHVNG

SEQ ID NO: 791 - protein, 242 aa, Castanea mollissima
MVYPNQSMSLSPQRKIGRGKMEMKRIENTTNRQVTFCKRRNGLLKKAYELSVLCDAEVALIVFSTRGRLYEYANNSVKSTIERYKKACADSSNTGSVAEANTQFYQQESAKLRAQIGNLQNSKQANDGESLSNLTVKELKSLEIKLERGISRIRSKKNELLFAEIEYMQKREVELHNNNQLLRAKIAENERNQQNLNVMPAGGGSYELMQTQQYDSRNFFQVNALQPNHQYPREDQMSLQLV

SEQ ID NO: 792 - protein, 513 aa, Ralstonia eutropha JMP134
MSDKLIIFDTTLRDGEQSPGASMTREEKIRIAKQLERLKVDVIEAGFAASSNGDYEAIRSIAQVVKDSTICSLARANDKDIARAAEALKPANSFRIHTFIATSALHMEKKLRMTPDQVYEQARLAVRFARQFTDDIEFSPEDGSRSDMDFLCRVLEGVIAEGATTINLPDTVGYAVPEGYADLIRSVRERIPNSDKAVWSVHCHNDLGMAVANSLAAVKLGGARQIECTINGLGERAGNTSLEEVVMAVKTRRDYFNLDVGVDTSQIVPASKLVSQITGFVVQPNKAVVGANAFAHASGIHQDGVLKARDTYEIMRAEDVGWTANKIVLGKLSGRNAFKQRLQELGVELESEAEVNAAFGRFKELADQKAEIFDEDIMAIVSNEAQHDANEHYRFISLSQRSETGERPHARVVFNMDGQEHSGEGEGNGPVDATLHAIESQVNSGAEMVLYSVNAITGGTEAQGEVTVRLSKAGRIVNGVGTDPDIVAASAKAYLAALNKLHDKAVQKINPQI

SEQ ID NO: 793 - protein, 483 aa, Methanosarcina barkeri str. Fusaro
MRDGEQTPGVALTKDKKLLIARALDEMGVSIIEAGSAITSKGERESIRAVANAGLNAEICSYCRIVKSDVDRALECDVDSIHLVAPVSDLHIKTKIKKGRDAVRQIAVDVIEYAKDHGLIVELSGEDASRADPEFLKTIYADGIDAGADRLCFCDTVGLLVPERTTKIFRDLSSSLKAPLSIHCHNDFGFATANTVAALAAGAKQAHVTVNGLGERAGNASLEEVVTSLEWLYKYNTGIKHEMIYRTSRLVSRLTGIPVSPNKALVGGNAFTHEAGIHVHGLLADKATYEPMTPEYIGRQRQIVLGKHAGRSSITLALKEMGLVADDAQTEEIFNRVKQMGDQGKHVTDADLHTIAENVLDIYKEPLVKMEEFTIVSGNRVTPTASIKLNVKDKAIVQAGIGNGPVDAVINAIRRAVRSCAEDIILEEYHVDSITGGTDALVEVRVKLSKDGKEVTASGARTDIIMASVEAVMNGMNRLIRAE

SEQ ID NO: 794 - protein, 502 aa, Methanosarcina barkeri str. Fusaro
MRNKKVTVFDTTLRDGEQTPGVSLTSAQKLEIARQLDKLGVDIIEAGFPISSEGDKESVKSISNAGLDLEVCGLARVLKKDVDACFDSDVGLVHTFVPTSEVQRTYTIKKSQEEVIQMAVETVQYIKDNGRRCMFSAMDATRTEPEYLIEVFKAVQEAGCDIINVPDTVGVMVPSAMYRQIKDIADEVTIPIDVHCHNDFGLAVANSLMAVEAGASQVQVTINGIGERAGNADLSQTVMSLTSIYGAKTNIHTEYLVETSKMIENYTGIRLPPNTPVVGQNAFSHESGIHSQGVLEKSDTFEPGIMTPEMVGHKRRIVLGKHTGKHAVKQSLESAGIISNDEQLDEIVSRIKEIANKGKHITDADLYAVASAVLGKASSEDELIKLKEVSVMTGNILTPTAVVKADIEGKETIAAKTGVGPVDAALKAVRDILGESNHFRLQEFRIDAITGGADALADVYIGLENEKGRVVTARSANPDIVMASVEALVNAMNLLYKREEKS

SEQ ID NO: 795 - protein, 405 aa, Methanosarcina barkeri str. Fusaro
MSESEQYSRNKLMDFIEYRPLDVEICDVTLRDGEQTPGVVFTKEQKLAMASELDSMGVEVIEAGFPVVSANEKETVKEIANQGFDSRICCLSRAVKGDVDAALECDVDIVSIFIAMSDMHLKYKYHRSLEEMLGCAKETIEYATDHGLKVRFAAEDASRTPIDRLKQAFKEVENEYKVQYVSLADTIGILNPTTTHYLVSEIFKEVNTSICIHCHDDLGMATANTLAAAEAGAKQLHTTVNAIGERAGNASLEEVIVALRVQYGIDRYDTTKLTSLSKMVSEYSGITPSVNKAVVGQNAFTHESGIHVAAILEEPRTYELFLPEMVGGQRNLVVGKHTGTKALKGIINSIGFCLEREELCALIEKVKVCTEEKHKSISRDQLERLITQVRQESKTTEQEEEKFSI

SEQ ID NO: 796 - protein, 505 aa, Dehalococcoides sp. CBDB1
MDRIKIFDTTLRDGEQAAGASLNAQEKLEIARQLEKLGVDIIEAGFPITSPGDFEAVKLIAQEVRTPVICGLARAIPADIDRAWEALKEAAHPRIHVFISSSEIHMVHQIKKSRDEVLELARTMVAKAKGYTDDIEFSPMDASRSDPEFLYKLLEAVIDAGATTLNIPDTVGYAIPSEFGELIKGIRQNVPNIGKAVISVHCHDDLGMGTANSLAAVKNGARQVECTLNGIGERAGNAALEEVVMALRTRSDFFNFETGINTQEIYRTSRLVSALTGFAIQPNKAVVGENAFRHQSGIHQDGVIKMAKTFEIMDPKEVGIQASSLVLGKLSGRHAFKQHLTELGFDLNEEDFDRAFKAFKDLADKKKDVTDRDIEALVAEELRTTVELYHLDRIQVTSGDRGIPTAAVRLTTPNGGAVEDASLGSGPVDAVYKAINRIVNVPNKLTEFSVKSVTAGIDALGEVLIRIESDGVTYTGRGSDTDIIVASAKAYMNALNRLLRVKNAS

SEQ ID NO: 797 - protein, 589 aa, Solanum pennellii
MFFFLQLLVPIISVFQSKKHYYSTFIRCSISNRRPEYVPSKISDPKYVRIFDTTLRDGEQSPGATMTTKEKLDVARQLAKLGVDIIEAGFPASSEADFESVKLIAEEIGNNTDENGFVPVICGLSRCNKSDIDKAWEAVKYAKKPRVHTFIATSEIHMKYKLKMSREQVVEKARSMVAYARSLGCEDVEFSPEDAGRSDREFLYDILGEVIKAGATTLNIPDTVGYTVPSEFGQLITDIKANTPGIENVIISTHCQNDLGLSTANTLAGACAGARQLEVTINGIGERAGNASLEEVVMALKCRGEQVLGGLYTGINTQHIVPSSKMVEEYSGLQVQPHKAIVGANAFAHESGIHQDGMLKHKDTYEIISPDDVGLSRSNEAGIVLGKLSGRHALKSKMLELGYDIDGKELEDLFWRFKSVAEKKKKITDDDLIALMSDEVLQPNVYWKLGDVQIMCGSLGLSTATVKLINTDGQEHIACSVGTGPVDAAYKAVDLIVKVPITLLEYSMNAVTEGIDAIASTRVSICSIDRHTIMNGSTGQTIHRTFSGTGADMDVVISSVRAYIGALNKMLSYEKLVSRYSKPEDSVVV

SEQ ID NO: 798 - protein, 612 aa, Solanum pennellii
MASITANHPISGKPLISFRPKNPLLQTQTLFNFKPSISKHSNSSFSIPVVRCSIRRIPEYTPSHIPDPNYVRIFDTTLRDGEQSPGATMTTKEKLDVARQSAKLGVDIIEAGFPASSEADLEAVKLIAKEVGNGVYEEEYVPVICGLARCNKKDIDKAWEAVKYAKKPRIHTFIATSEVHMNYKLKMSRDQVVEKARSMVAYARSIGCEDVEFSPEDAGRSDPEFLYHILGEVIKAGATTLNIPDTVGYTVPEEFGQLIAKIKANTPGVEDVIISTHCQNDLGLSTANTLAGACAGARQLEVTINGIGERAGNASLEEVVMALKCRGEQVLGGLYTGINTQHILMSSKMVEGISGLHVQPHKAIVGANAFVHESGIHQDGMLKHKDTYEIISPEDIGLNRANESGIVFGKLSGVMLCKPKMLELGYEIEGKELDDLFWRFKSVAEKKKKITDDDLVALMSDEVFQPQFVWQLQNVQVTCGSLGLSTATVKLIDADGREHISCSVGTGPVDAAYKAVDLIVKVPVTLLEYSMNAVTQGIDAIASTRVLIRGENGHTSTHALTGETVHRTFSGTGADMDIVISSVRAYVGALNKMMSFRKLMAKNNKPESSAVI

SEQ ID NO: 799 - protein, 511 aa, Thiobacillus denitrificans ATCC 25259
MNDRLFIFDTTLRDGEQSPGASMTKDEKLRIARQLEKLGVDVIEAGFAAASPGDADAIRAIAETVRNSTVCSLARANERDIHAAGGAIKPAKSGRIHTFIATSPIHMEKKLRMQPDQVVEAAVKAVKLAREYTDDVEFSAEDAVRSDMDFLVRIFDEVIKAGAKTINVPDTVGYSIPALWGERMKALIERVPGSDKVIWSTHCHNDLGMAVANSLAAVMNGARQVECTINGLGERAGNASLEEIVMAVRTRRDVFGCDTRIDATQIVPSSKLVSTITGYPVQPNKAIVGANAFAHESGIHQDGVLKHRETYEIMRAEDVGWNANRLTLGKLSGRNAFKTKLAELGIVLDSEEALNAAFARFKDLADKKREIFDEDLQALVSDEGYATEDERFKLLSMKVCSETGEVPRAQLVFTDDGAEKQASGEGSGPVDATFKALESVVHSGADLLLYSVNNITSGTDAQGEVTVRLAQDGRVVNGQGADTDIVVASAKAYLHALNKLHSKRERAHPQV

SEQ ID NO: 800 - protein, 675 aa, Arabidopsis thaliana
MASSLLRNPNLYSSTTITTTSFLPTFSSKPTPISSSFRFQPSHHRSISLRSQTLRLSCSISDPSPLPPHTPRRPRPEYIPNRISDPNYVRVFDTTLRDGEQSPGATLTSKEKLDIARQLAKLGVDIIEAGFPAASKDDFEAVKTIAETVGNTVDENGYVPVICGLSRCNKKDIERAWDAVKYAKRPRIHTFIATSDIHLEYKLKKTKAEVIEIARSMVRFARSLGCEDVEFSPEDAGRSEREYLYEILGEVIKAGATTLNIPDTVGITLPSEFGQLITDLKANTPGIENVVISTHCQNDLGLSTANTLSGAHAGARQMEVTINGIGERAGNASLEEVVMAIKCRGDHVLGGLFTGIDTRHIVMTSKMVEEYTGMQTQPHKAIVGANAFAHESGIHQDGMLKHKGTYEIICPEEIGLERSNDAGIVLGKLSGRHALKDRLTEVHSNLTHTNTCIAIFVGDTNVLLSFVHFQLGYQLDDEQLSTIFWRFKTVAEQKKRVTDADIIALVSDEVFQPEAVWKLLDIQITCGTLGLSTATVKLADADGKEHVACSIGTGPVDSAYKAVDLIVKVLFIPLRLSSTNNSPEPATLLEYSMNAVTEGIDAIATTRVLIRGSNKYSSTNAITGEEVQRTFSGTGAGMDIVVSSVKAYVGALNKMMDFKENSATKIPSQKNRVAA

SEQ ID NO: 801 - protein, 623 aa, Brassica insularis
MESSILRNPMLSSPTTITTPSLPSFSSKPSPLSFRFPPSHHRSSLRIKSLRLSCSLSDPSPPLCRRRPEYIPNRISDPNYVRVFDTTLRDGEQSPGATLTSKEKLDIARQLAKLGVDVIEAGFPAASKDDFEAVKTIAGTVGNAVDGDGYVPVICGLSRCNKRDIETAWEAVKYAKRPRIHTFIATSDIHLEYKLKKSKDEVIEIARNMVKFARSLGCEDVEFSPEDAGRSEREFLYQILGEVIKAGATTLNIPDTVGITLPSEFGQLIADIKANTPGIENVIISTHCQNDLGLSTANTLSGAHSGARQVEVTINGIGERAGNASLEEVVMAIKCRGDHVLGGLYTGIDTRHIVMTSKMVEDYTGMQTQPHKAIVGANAFAHESGIHQDGMLKHKGTYEIICPEEIGLERSNDAGIVLGKLSGRHALKDRLTELGYVLDDEQLSSIFWRFKSVAERKKRVTDADIIALVSDEVFQPEALWKLLDIQITCGTLGLSTATVKLADADGKEHVACSMGTGPVDSAYKAVDLIVKEPATLLEYSMNAVTEGIDAIATTRVLIRGNNNYSTTNAITGEEVQRTFSGTGAGMDIVVSSVKAYVGALNKMLDFKENSTTKIPSQNNKVPA

SEQ ID NO: 802 - protein, 378 aa, Anabaena variabilis ATCC 29413
MQMNKVLINDTTLRDGEQAAGVAFSVEEKIAIAKFLDAIGVDEIEVGIPAMGKAEQEAIANIVKLNLSANLLGWNRAVISDIQASIACGLQRVHISIPVSAIQIAAKFHGQWQVVLQKLHDSISFAVDQGLFVSIGGEDSSRAEESFLLDVVLAAQEWGASRFRFCDTVGILDPFTTHAKIKQLVASLTIPVEMHTHNDFGLATANALAGIKAGALSVNTTVNGLGERAGNAALEEVVMALKHLYHHDLGIDTRRLLEISQLVVSASGHPVPPWKAIVGENTFAHESGIHAHGVLQNPQTYEPFAPEEVGRERRLVVGKHSGRHLLSSILQQHDIILNHEETQSVLDAVRQESVEKKRSLTPQELLHLVQTKQHFRAC

SEQ ID NO: 803 - protein, 531 aa, Anabaena variabilis ATCC 29413
MTTKPERIIIFDTTLRDGEQCPGATLNIDEKLAIAKQLARLGVDIIEAGFAFASPGDFEAVHKIAQTVGTENGPVICSLARARHDDIKAAAEAIKPAAKGRIHTFIATSDIHLQYKLKKTRPEVIAIAEEMVAYAKSFTDDVEFSPEDAGRSDPEFLYQVLERAIAAGATTINIPDTVGYTTPSEFGAIIKGIKENVPNIDQAIISVHGHNDLGLAVANFLEAVKNGARQLECTINGIGERAGNAALEELVMAMHVRRQYFNPFLGRHPDSEEPLTNIDTKQIYKTSRLVSNLTGMLVQPNKAIVGANAFAHESGIHQDGVLKNKLTYEIMDAQLIGLTDNQIVLGKHSGRNAFRTRLKELGFELSETELNKAFVKFKEVADKKKEISDWDLEAIVNDEIQQAPDLFRVELVQVSCGSNARPTATVTLRTPDGEELTDAAIGTGPVDAVYKAINRVVNVPNQLIEFSVQSVTAGIDAIGEVTIRLRYESRVFSGHAANTDIIVASAQAYVNALNRLYASLQTQDKQTEVTA

SEQ ID NO: 804 - protein, 377 aa, Anabaena variabilis ATCC 29413
MNKVLINDTTLRDGEQAAGVVFTLEEKVAIAKFLDTIGVPELEVGIPAMGEEEMRAICAISNLGLKANLLAWNRAVISDIKASVACGMERVHIAIPVSGIQIAAKFHGQWRVSLQRLKDCISFAVDQGLWVAVGGEDSSRADENFLLDVALYAQEWGASRFRFCDTVGVLDPFTTYGKVKLLVSALTIPVEVHTHNDFGMATANALAGIKAGAASVNTTVIGLGERAGNAALEEVVMAIKRIYGVDMGIDTPRLLELSQLVAAASGANVPPWKAIVGENTFAHESGIHAHGVLQNPDTYEPFAPEEVGWERRLVVGKHSGRHSVSNLLEQHGIFLNPEETQSVLDAVRQQSVKKKRSLTTEELLNLVKEQRYSHAAR

SEQ ID NO: 805 - protein, 372 aa, Anabaena variabilis ATCC 29413
MNNVVIHINDTTLRDGEQAAGIAFNVEEKIAIASLLDSIGVHELEVGIPAMGHEEAESITRIAKLGLNAKLLGWNRANLSDIQASIDCGLDRVHVSVPVSDIQIAAKFKGQRQLVLDKLRDAINFACDRGLSVSVGGEDSSRADESFLLEVAQSAQEWGAFRFRFCDTVGILDPTTTYKKVSHLVSHLSIVIEMHTHDDFGMALANTLAGVKAGAISVNTTVNGIGERAGNAPLEEVVMGLKYLYDIPTGIDTKRLVEVSRLVSKATNFPVLPWKAIVGENTFAHESGIHAHGVLQNPITYEPFAPEDVGWERRLVVGKHSGRHLLLSVLEQHGITLGQAEIQSVLDAVRHQSVKTKRSLTVEELLSLVPQR

SEQ ID NO: 806 - protein, 309 aa, Picea glauca
MACDRSALYTSSVIMNTEDNSSAHAIAAMIASSCTPPATFQGTRSISVFETGNERKRPAGNSYSALELSDDIGDEDGSDDCIHLGEKKRRLTLEQVRALEKNFEMANKLEPEKKMQLAKALGLQPRQIAVWFQNRRARWKTKQLEKDFNVLKQDYDALKQDYDNLMEENNNLQAMIERMSSKSQSCNDQKFQANSSKLQKDDQDLQLLMMSATKVDCADKENNNEGPSSIGSEGSSVLDMDSPGTIDSQQNIDSIGFSNVKARDLRLECNFRPKVEENVSQADEPCNYLFYNNLETGPLLWDYNWSSGL

SEQ ID NO: 807 - protein, 270 aa, Neurospora crassa
VIEYVKSKGLEVRFSSEDSFRSDLVDLLSLYRAVDKVGVHRVGIADTVGCASPRQVYDLVRTLRGVVSCDIETHFHDDTGCAIANAYCALEAGATHIDTSVLGIGERNGITPLGGLMARMIVTSPDYVKSKYKLHKLKELEDLVAEAVEINTPFNNPITGFCAFTHKAGIHAKAILNNPSTYEILNPADFGLTRYVHFASRLTGWNAVKTRVGQLGLEMTDDQVKECTAKIKALADVRPIAIDDADSIIRTFHLGLHEQNKVQPPAVVEN

SEQ ID NO: 808 - protein, 529 aa, Rhodobacter sphaeroides 2.4.1
MTDTTKTASEQDRVLIFDTTLRDGEQSPGATMTHDEKLEIAALLDEMGVDIIEAGFPIASEGDFEAVSAIARQSKNATICGLARANYKDIDRCWEAVRHAKSPRIHTFIGTSPLHRAIPNLDMDQMAERIHDTVSHARNLCDNVQWSPMDATRTEHDYLCRVVEIAIKAGATTINIPDTVGYTAPRESADLIRMLVERVPGADTIVFATHCHNDLGMATANALAAVEAGARQIECTINGLGERAGNTALEEVVMALKVRNDIMPFRTGIDTTKIMNISRKVATVSGFPVQFNKAVVGKNAFAHESGIHQDGMLKNAQTFEIMRPADVGLADTSLVMGKHSGRAALRAKLKDLGYDLADNQLNDVFVRFKALADRKKEVYDDDIVALIQDQVTSAEHDTLQLKRLRVVCGTDGPQEAEMTLSVEGVDHAIDATGDGPVDAAFNAVKMIYPHHAKLHLYQVHAVTEGTDAQATVSVRLEEDGKIATGQAADTDTVVASVKAYVNALNRLIHRRQKSAPGADMKDVHYSSHA

SEQ ID NO: 809 - protein, 358 aa, Rhodobacter sphaeroides 2.4.1
MSRQQPRASFLPESPLAPVALCDTTLRDGEQTAGVAFTRAEKRAIAEALQAAGVAEVEVGVPAMGEEERADIRAVAAVLKTAAPVVWCRLRAEDLAAAQRTGVVRLHIGVPVSERQISAKLGKDAAWVRDKVEKLVRAASWAGHKVSVGAEDASRADPFFLAEIAHVAAEAGAIRFRISDTLGVLDPFAAHELVGRVVTRCPLPVEFHGHNDLGMATANSLAAARAGASHLSVTVNGLGERAGNAALEEVAAALEAAGRATGVALGQLCALSELVARASGRPLSPQKPIVGEGVFTHECGIHVDGLMKDRATYESADLRPERFAAATASPSASIPRPPGSPGRWPRRGFPPTRRRSRP

SEQ ID NO: 810 - protein, 635 aa, Oryza sativa Japonica Group
MASSLLSSPKPSSFSSANPTSTPRPRAQTLSPFRAAAPRFSHGLATAAAAANPSASRRCYHRAFARPVRASMAQPRRPEYVPNRIDDPNYVRIFDTTLRDGEQSPGATMTSAEKLVVARQLARLGVDIIEAGFPASSPDDLDAVRSIAIEVGNTPVGEDGHVPVICGLSRCNKRDIDAAWEAVRHARRPRIHTFIATSEIHMQHKLRKTPEQVVAIAKEMVAYARSLGCPDVEFSPEDAGRSNREFLYHILEEVIKAGATTLNIPDTVGYTLPYEFGKLIADIKANTPGIENAIISTHCQNDLGLATANTLAGAHAGARQLEVTINGIGERAGNASLEEVVMAIKCRRELLGGLYTGINTQHITMSSKMVQEHSGLHVQPHKAIVGANAFAHESGIHQDGMLKYKGTYEIISPDDIGLTRANEFGIVLGKLSGRHAVRSKLVELGYEITDKEFEDFFKRYKEVAEKKKRVTDEDIEALLSDEIFQPKVFWSLADVQATCGTLGLSTATVKLIGPDGEEKIACAVGTGPVDAAYKAVDDIIQIPTVLREYSMTSVTEGIDAIATTRVVVTGDVSDSKHALTGHSFSRAFSGSGAALDIVVSSVRAYLSALNKMSSFVGAIKASSEVSESQRVQTTE

SEQ ID NO: 811 - protein, 379 aa, Anabaena variabilis ATCC 29413
MNKVLINDTTLRDGEQAAGVAFSVEEKIAIAKFLDAIGVDEIEVGIPAMGKAEQEAIANIVKLNLSANLLGWNRAVISDIQASIACGLQRVHISIPVSAIQIAAKFHGQWQVVLQKLHDSISFAVDQGLFVSIGGEDSSRAEESFLLDVVLAAQEWGALRFRFCDTVGILDPFTTHAKIKQLVASLTIPVEMHTHNDFGLATANALAGIKAGALSVNTTVNGLGERAGNAALEEVVMALKHLYHHDLGIDTRRLLEISQLVVSASGHPVPPWKAIVGENTFAHESGIHAHGVLQNPQTYEPFAPEEVGRERRLVVGKHSGRPLGMSSILQQHDIILNHEETQSVLDAVRQESVRKKTQSHTSRTFTFSADKNYIFVPVE

SEQ ID NO: 812 - protein, 381 aa, Anabaena variabilis ATCC 29413
MNKVLINDTTLRDGEQAAGVVFTLEEKVAIAKFLDTIGVPELEVGIPAMGEEEMRAICAISNLGLKANLLAWNRAVISDIKASVACGMERVHIAIPVSGIQIAAKFHGQWRVSLQRLKDCISFAVDQGLWVAVGGEDSSRADENFLLDVALYAQEWGASRFRFCDTVGVLDPFTTYGKVKLLVSALTIPVEVHTHNDFGMATANALAGIKAGAASVNTTVIGLGERAGNAALEEVVMAIKRIYGVDMGIDTPRLLELSQLVAAASGANVPPWKAIVGENTFAHESGIHAHGVLQNPDTYEPFAPEEVGWERRLVVGKHSGRHSVSNLLEQHGIFLNPEETQSVLDAVRQQSVKKKRSLTTEELLNLGQRTEVFSCSAMKTS

SEQ ID NO: 813 - protein, 509 aa, Carboxydothermus hydrogenoformans Z-2901
MERVRIFDTTLRDGEQSPGVSLNAMEKLQIARQLQKLGVDVIEAGFPITSPGDKEAVSLIAREVKGVVVAALARASALDIETAWDAIKDAESPRIHTFIATSDIHLKYKLKMDRETVVERAVAAVKLAKKFTADVEFSAEDASRSDLDFLCRVVEAAVKAGATTINIPDTVGYAEPEEFGEFICKILEKVPVMDRAVLSVHCHDDLGLAVANSLAAIKNGARQVECTINGIGERAGNCSLEEIVMALYTRKDVLPFYTGIKTEEIYRTSKLVSNLTGMPVQPNKAIVGKNAFSHESGIHQDGVLKERTTYEIMNPRLVGIPESRLVLGKHSGRHALKERLLELGYELTEEQLNEAFVKFKALADKKKEVTDQDLEAMMEEEIRKVPETYTLDYFHISTGSTIIPTATVGLIKEGEKLEDAATGDGPVDAIYKAINKITGLTPVLEQYSINAVTSGEDALGEVVVKLKNGLGKIVTGRGVSTDILEASAKAYLNGINKLLFDYQAKGEKQ

SEQ ID NO: 814 - protein, 380 aa, Carboxydothermus hydrogenoformans Z-2901
MKLKDKPIYIVDTTLRDGEQTAGVVFANKEKIRIAQMLDELGVDQIEAGIPTMGGDEKEAITAICKLGLKASIMGWNRPVIKDIEESLRCGVDAVAISISTSDIHIEHKLRASREWVIENMVKACEFAKKEGLYVSVNAEDASRSDMEFLVQFGLAAKQAGADRLRYCDTVGILDPFTTYERVKELRERVGIEIEMHTHNDFGMATANALAGVKAGAKFVGVTVIGLGERAGNAALEEVVMALKHIYGIDLGFKTELFREVALYVSKASGRELPAWKAIVGSNMFAHESGIHADGALKNPKTYEAFQPEEVGLERQIVIGKHSGSAALKAKFAEYGIHLTDEQAAELLPHVRAHAVELKRSLFDKELVLIYEEHFGKRGM

SEQ ID NO: 815 - protein, 520 aa, Xanthomonas campestris pv. vesicatoria str. 85-10
MNTTVSNQTPRIRIFDTTLRDGEQSPGCSMTPQQKLVMARALDELGVDIIETGFPASSHSDREAVAMMGRELRRPTLAVLSRCLQADIETSAKALETAANPRLHVFLSTSPLHREHKLRMSREQVLESVHRHVTLARGYIDDVEFSAEDATRTEEDFLAEVTRVAIAAGATTINLPDTVGFTTPEEIRGMFSRLIASVEGADKVIFSAHCHNDLGLAVANSLAAIEGGARQVECTINGIGERAGNCALEEITMALKVRGAFYNIDSAINTPRIVSTSQLLQRLVGMPVQRNKAVVGGNAFAHESGIHQHGMLRHRGTYEIMRPEDVGWESSQMVLGRHSGRAAVEQRLRALGYLLEEEEVKLVFEQFKALCEKQRVVTDADLQALMQDATVQEGYRLASMTISDVGSRANALVELSDPEGNRVAETAQGNGPVDALFGALASATGVKLELDSYQVHSVGIGADARGEASLSVRHDGVEYEGTGTSKDIIEASALAWLDVANRLLRQRERGVVAGKTAAVA

SEQ ID NO: 816 - protein, 514 aa, Burkholderia sp. 383
MTDKLIIFDTTLRDGEQSPGASMTKEEKIRIAKHLERMKVDVIEAGFAASSNGDFDAIHTIAGLIKDSTICSLARANDKDIQRAADALKPAESFRIHTFIATSPLHMEKKLRMTPDQVFEQARLAVRFARKFTDNVEFSPEDGSRSDMDFLCRVLEAVIAEGATTINIADTVGYGVPELYGNLVKTLRERIPNSDKAIFSVHCHNDLGMAVANSLAGVKIGGARQIECTINGLGERAGNTSLEEIVMAVKTRKDYFGLDVGIDTSQIVPTSKLVSQITGFVVQPNKAVVGANAFAHASGIHQDGVLKARDTYEIMRAEDVGWTANKIVLGKLSGRNAFKQRLQELGVSLDSESELNAAFMRFKDLADRKAEIFDEDIIAIVSEESALAHEQEHFKFVSLSQHSETGEQPHAKVVFGVEGKEVTGEARGNGPVDATFNAIESEVGSGSELLLYSVNAITTGTQAQGEVTVRLSKSGRIVNGVGTDPDIVAASAKAYISALNKLHSKDDKVNPQRS

SEQ ID NO: 817 - protein, 540 aa, Synechococcus sp. CC9605
MAKDPGRVLIFDTTLRDGEQSPGASLNLEEKLAIAQQLARLGVDVIEAGFPFASPGDFAAVQRIAQQVGGDNGPIICGLARASRADIKACADAVAPAPRRRIHTFIATSDIHLEHKLRKSRGDVLGIVPEMVSYARSLVEDVEFSCEDAGRSDPEFLYEVIEAAIAAGATTINIPDTVGYTTPSEFGALIAGINQHVPNIGEAVISVHGHNDLGLAVANFLEAVKNGARQLECTINGIGERAGNASLEELVMALHVRRRYYNPFFGREEDSPTPLTAVRTEEITKTSRLVSNLTGMVVQPNKAIVGANAFAHESGIHQDGVLKNRLTYEIIDAQTVGLSDNRISLGKLSGRSAVRARLEELGYDLTREDLDEAFARFKELADRKREITDRDLEAIVSEQVQQPEARFQLKLVQVSCGSSLRPTATVTLLDEEGSETTGSAVGTGPVDAVCRALNDLAGVPNELIEFSVKSVTEGIDAMGDVTIRLRRNGALYSGHAADTDVVVAAGMAFVNALNRLVAGEERQSLHPQKDPVVLESRPTL

SEQ ID NO: 818 - protein, 383 aa, Geobacter metallireducens GS-15
MESATKNTVIIDDTTLRDGEQTAGVVFSKREKLAIARLLDDIGVQELECGIPAMGEEEREVIRALVDLGLNARLITWNRAVIPDIEASLACGVAAVDISLSVSDQMIAHKLRTSRDGVMEQLKRALGFAKEHDLYVSVGGEDASRADLGFLAELMEITCSMGGDRFRFCDTLGILDPFTMYEKVKALRAAAPGLDIEVHTHNDLGMATANALAGIKAGARFVNTTVNGLGERAGNAALEEVVMGLKLACGIDPGIDTHRFHEISRFVGRASQRPVPPWKAVVGERVFSHESGLHADGVIKDARNYEGFDPAEVGLCRHIVVGKHSGTSGLVERFRQMGIELSRQEAGALMDGVRAMAQRLKRPLSDGELRALHAAGRCALRAA

SEQ ID NO: 819 - protein, 512 aa, Geobacter metallireducens GS-15
MAELKTIKIFDTTLRDGEQSPGNSMNIDEKLRVAKQLLKLNVDVIEAGFPIASEGDFEAVKRVAQTIKGPEIAGLCRSSDKDIDRAWEALKYAGEKGRIHTFIATSDIHMKYKLKMTREQVLENAVKAVKRAKSYTPNVEFSCEDAVRTDLAFLVQMVEAVIDAGVTTVNIPDTVGYTIPFEYFNIIRHLKENVSNIEKAVISVHCHNDLGLSVANSIAAVQAGAGQVECTINGIGERAGNCSLEEFVMAIKTRHDILPFRTNVDHEQIVPASRLLSTITGIGVQPNKAIVGANAFAHESGIHQHGVLMEKSTYEIMTPESIGLKTNVLVLGKHSGRHAFKKRLAELGYELSDEDLNRAFERFKALADLKKEVFDEDLDALVADEVMRPAEKFRLSHITVTCGSFAVATSTVQMEIDGTAVRTAELGDGPVDATLKAIKKLTKTKAKLQQYNVGSITGGTDAQGEVTVRVTDGNETVVGRGSSTDIIEASAKAYINALNRLNAKIERIHESL

SEQ ID NO: 820 - protein, 507 aa, Desulfovibrio desulfuricans subsp. desulfuricans str. G20
MADRLYIFDTTLRDGEQSPGATMNIHEKVQLARQLEMVGVDIMEAGFPAASKGDFEAVKTIAATVKNAQVAGLCRAVQPDIDHAWAAIRNAAHPRIHTFIATSPVHMQYKLRKSPEQVLEMARDAVRYAAGLCSNVEFSAEDASRSDWDFLTRVVETAIDAGATTINIPDTVGYAQPDEFGALVRYVMENARNSHKAVFSVHCHNDLGLAVANTLAALKAGARQAEVTVSGIGERAGNAALEELVMALRTRHAYYDMETGIKSEQLFPACRLLSMIIGQPIPANKAIVGANAFAHESGIHQDGMLKNRETYEIMTPESVGRTKTEIVLGKHSGRNAINGKLEELGYRLTPEQTQLVFDAVKKLADRKKQIYDEDMEALVLEEVFRIPDMFRLVHLSVQASDTGVPPSAAIVMEVGGERRQHTTFGVGPIDAVFNAISQIVGRAPQLRHYSVNAITGGTDAQGEVTVKLQENGSAAVGRGADADIITASAKAYLNALNRLAKKEQEDK

SEQ ID NO: 821 - protein, 514 aa, Thiomicrospira crunogena XCL-2
MKEELVIFDTTLRDGEQSPGASMTKEEKVRIAKQLEKLRVNVIEAGFPAASQGDFESVQAVASAVKDSTVCGLARAVENDIVRAGEAIKLANSGRIHTFIATSPIHMEKKLKMSPDEVVERAVWAVKRARDFTDNVEFSPEDAGRSELDFLCRVIEAAIDAGATTINIPDTVGYNVPEQFGELFHQLLNRIPNADKAIFSAHCHNDLGLAVANSLAAVKSGARQVECTINGLGERAGNTALEEVVMAVRTRQDWFDVDTRIHTPEILAASRLVAGITGFAVQPNKAIVGTNAFSHESGIHQDGVLKHRETYEIMRAEDVGWSTNKMVLGKHSGRSAFRSRLKELGIEFETEQELSDAFISFKELADRKHEIYDEDIQALVTDNNTRRVENETFRLVALKVGTQTGDAPTATITLWIDGEEKTASSEGGGVVDATFKAIEKLVDSGATLELYSVSNVTNGTDSLGETTVRMEKAGRIVNGQGADTDIVTASAKAYINALNKLIDTGSKEHPQAHV

SEQ ID NO: 822 - protein, 285 aa, Hordeum vulgare
APEYYFPTLVSSAEENMASFAATQLGLNLGYRTYFPPRGGYTYGHHPPRCQAEGCKADLSGAKRYHRRHKVCEHHSKAPVVVTAGGLHQRFCQQCSRFHLLDEFDDAKKSCRKRLADHNRRRRKSKPSDADAADKRRTQASKAAASTKGKAAGSSSKSTGTGDGMDIQVQLGSGDLSKDQDETMGQGEVVKEMQVDPKGKASMQLQQQQQQGHHVHGLHLQSQHGFPFPSTSAGSCFPQSQAVSSTDNTSNIGQVQQEQLGSLGFHQHSNILQLGQAMFDLDFDH

SEQ ID NO: 823 - protein, 546 aa, Prochlorococcus marinus str. MIT 9312
MSKDPGRILIFDTTLRDGEQSPGASLNLEEKLAIAHQLARLGVDVIEAGFPFASPGDFKAVNKISNDVGKENGPIICGLARASKGDIKACYEAVSPAPKKRIHTFIATSDIHLKHKLKKSRKDVLQIVPEMVNYAKTLVEDIEFSCEDASRSDPDFLYEVIQLAISAGATTINIPDTVGFTTPSEFGKLISDINKNVPNIDEAVISVHGHNDLGLAVANFLEAVKNGARQLECTINGIGERAGNASLEELVMALHVRKSFFNSFFKRNPDSPTPLTAIRTEEITKTSRLVSNLTGMTVQPNKAIVGANAFAHESGIHQDGVLKNRLTYEIIDAKTVGLSDNKISLGKLSGRSAVRARLEEMGYDLSREDLNDAFARFKDLADRKREITDRDLEAIVSEQVQLPEAKFQLCLVQVSCGNASKPTATITLLNTADNTEDTAVSVGTGPVDAVCEALNKLAKVPNELIEFSVKSVTEGIDALGEVTIRIRRDNKIYSGHSADTDVVVAAANAYVNALNRLVFSEKKNSIHPQFDNLENSNKTFLSNPAN

SEQ ID NO: 824 - protein, 540 aa, Synechococcus elongatus PCC 7942
MASASSNDRILIFDTTLRDGEQSPGASLNLEEKLAIARQLARLNVDIIEAGFAFASPGDFEAVQRIAAEVGTPDGPTICSLARATRQDIKAAAEALAPAAKGRIHTFIATSDIHLEYKLKKTRAEVLAVIPEMVGYAASLVDDVEFSPEDAGRSDPEFLYECLEAAIAAGAKTINIPDTVGYTTPSEFGALIGGIKQNVCNIDQAIISVHGHNDLGLAVANFLEAVKNGARQLECTINGIGERAGNAALEELVMALHVRRQYFNPFLGRAADSEAPLTQVNTREIYKTSRLVSNLTGMLVQPNKAIVGANAFAHESGIHQDGVLKNKLTYEIVDAETIGLSTNRITLGKLSGRNAFRTRLQELGYDLGEDDLNRAFLRFKELADKKREVTDRDLEAIVNDETQQAPELFKLELVQVSAGDHARPTATVTLRTPEGEELTDAAIGTGPVDAIYRAINRVVNIPNELIEFSVKSVTAGIDAIGEVTIRLRHEDRIFSGHSANTDILVASAQAYIHALNRLAEALQKDKPLHPQEPIVAGMGR

SEQ ID NO: 825 - protein, 310 aa, Brassica rapa subsp. pekinensis
MMKRLSSSDSVGGLISLCPTTSTDQPSPRRYGREFQSMLEGYEEEEEEAVTEERGQTGLAEKKRRLSINQVKALEKNFELENKLEPERKVKLALELGLQPRQVAVWFQNRRARWKTKQLEKDYGVLKTQYDSLRHNFDSLRRDNESLLQEIGKLKAKLNGEEEVEKMMKMENNAVTMECDVSVKEEEVSLPEELTDPPSSPPQALEHSDSFNYRSFTDLRDLLSLKAAASSVAAAGSSDSSDSRAVLNEESSSNVTAGPVTVPQGGFLQFVKMEQTEDHDDFLSGEEACGFFSEEQPPSLHWYSTVDQWN

SEQ ID NO: 826 - protein, 475 aa, uncultured archaeon
MSLTPKQKMEIAHQLDKLGVDVIEAGFPISSAGDKESVKSIANAGLTLDVCGLARVLTKDLDTCLDCGVDMIHTFVSTSDIQRIHTIKKSREEVIDMAVAAVDHIKDHGVKCMFSAMDATRTDLDYLLEVFKAVENAGCDIINVPDTVGVMVPSAMYTLIKNIDENVNIPIDVHCHNDFGLAVANSLLAVEAGARQVQVTINGLGERAGNADLAQTVMSLHSMYGAKTNINTEYIFETSQLVERYTGVRLQPHMPIVGENAFAHESGIHTHGVLERSDTFEPGIMTPEMVGHTRRIVLGKHAGKHAVKQSLESADIHPTDEQLTEILNRIKIIADKGKRITDADLYAVASVVLGKTEGEERIKLKELSVMTGNITTPAAVVKLIINGEESVTAKTGVGPVDAAINAVQNMIGEHTKIKVHDFRIEAISGGSDALAEVTIGVEDEKGRIVTAHSASADIVLASVDALITAINMLYK

SEQ ID NO: 827 - protein, 450 aa, uncultured archaeon
MSSEGEKQNVSEIAKMGLRLDVCGLSRSVFSDLDACLECEVDVVHTFIPTSDVQRIHTIKKSREEVLDMAIRAVEHIKDHGVKCMFSPMDATRTDFDYLLQISKAVQEAGCDVINIPDTVGVFVPSAMKALIADIKKDITIPIDVHCHNDFGLAVANSLAAVEGGGMQVQVTINGLGERAGNADLAETVMSLHSIYGAKTNIKTEYLVETARMVERYTGVRIPPTMPIVGDNAFAHESGIHTHGVLTRTDTFEPGIMTPEMVGHKRRIVMGKHAGRHAVIKTLKDAGLEPDNDQLNEIMSRMKDISNKGKSITDSDLFAIAEAIIGKVKKSERPIDLIEVSVMTGNIITPTASVKAMVRGEEKVGASIGVGPVDAALNAVQSIINGQRTMKLRDFKIEAISGGSDALAEVIIGVEDDKGRIMTARAANEDIVMASVEALVTAMNRILMMK

SEQ ID NO: 828 - protein, 383 aa, Moorella thermoacetica ATCC 39073
MGGQIKIVDTTLRDGEQTAGVVFANSEKLRIAKMLDAIGVDQIEAGVPVMGGDEKKVIKEIVDAGLRASIMGWNRAVIDDVRHSIDCGCDAVAISISTSDIHIEHKLRSTREKVIESMSRACEFAKKHNLYVSVNAEDASRTDPDYLLQFARAAREAGADRLRFCDTVGIMDPFGTYEKIKWLIEEVGLDVEMHMHNDFGMATANTLAGIRAGAKYAGVTVVGLGERAGNAALEEVVMALKYLENIDLKFKTEQFRELAEYVSLAARRQLPAWKAVVGSNMFAHESGIHADGALKDPRTYEVMTPEEVGLERQIVIGKHSGTAAIKAKFAEYGVHLEEADAAAILARVRALAVELKRPLFDKELAHIYEDYQEARKKAAVTAV

SEQ ID NO: 829 - protein, 517 aa, Moorella thermoacetica ATCC 39073
MADTGKRIYIFDTTLRDGEQSPGVSLNIQEKLEIARQLARLGVDVIEAGFPIASPGDFEAVRAVAREVEGPVIAGLARINERDIDRAWEALQEAQKPRIHVFIATSDIHLKYKLRMSRQEVLEAVRRGVARAKGYCQDIEFSPEDAVRSDLDFLCQVLATAIEAGATVLNIPDTVGYATPEEFGRLISQIRQRVPGIDKVRISVHCHNDLGLAVANSLAAIENGALQVEGAINGIGERAGNAALEEVIMALYTRRDYYGCRTGIVTEEIYRTSKLVSSLTGMPVQYNKAIVGKNAFTHEAGIHQDGVLKERTTYEIMNPAMIGLVQNNIFLGKHSGRHALRSRLEELGFKLTEAELDKAFARFKELADRKKEISDRDLEAIVEHEVKRIPEKFVLEHIHISTGNRVVPTATIGIRVGEELKEEAACGEGPVDAAFKAIDKLTRIPVCLKSYNLNAVTGGKDAVGEVTVKIEYDGRVFIGRGISTDVLEASARAYLNAINKVVYEVGEENLQQASTAQ

SEQ ID NO: 830 - protein, 515 aa, Burkholderia thailandensis E264
MTDKLIIFDTTLRDGEQSPGASMTKEEKIRIAKQLERMKVDVIEAGFAASSNGDFDAIQTIASQVKDSTICSLARANDKDIQRAADALKPANSFRIHTFIATSPLHMEKKLRMTPDQVYEQARLAVRFARKFTDNIEFSPEDGSRSDMDFLCRVLEAVIAEGATTINIADTVGYGVPELYGNLVKTLRERIPNSDKAIFSVHCHNDLGMAVANSLAGVKIGGARQVECTINGLGERAGNTSLEEIVMAVRTRKDYFGLDLGIDTTQIVPASKLVSQITGFVVQPNKAVVGANAFAHASGIHQDGVLKARDTYEIMRAEDVGWTANKIVLGKLSGRNAFKQRLQELGVSLDSEAELNAAFARFKDLADRKAEIFDEDIIAIVTEEESALAQEHEHYKFVSLAQRSETGERPQAKVVFAVDGDEVAGEASGNGPVDATFNAIETEVGSGAELLLYSVNAITTGTQAQGEVTVRLSRSGRIVNGVGTDPDIVAASAKAYIAALNKLYSNADKLNPQRA

SEQ ID NO: 831 - protein, 546 aa, Salinibacter ruber DSM 13855
MSDSITIFDTTLRDGEQAPGASMTVPEKVHIAHKLADLNVDVIEAGFPISSPAQTEAVTRIATEVDGPVTCALARTKEDDIDAAGEALADGTDTRLHTFIATSDVHIEAKFDKLGNTMAEKREAIIQRAVRAIEQALTYTDNVEFSAEDAGRTDPEFLCEVVQAAAEAGATTINIPDTTGYCAPSEYTDLLETVVDCLPDPDAVTLSTHCHDDLGLATANTLAGIRAGARQVECTINGIGERAGNAALEEIVMALTVRADAFDVTADVHTEHLTPTSQTVSAATGFPVQPNKAIVGSNAFSHEAGIHQHGVLEERTTYEIMSATDVGQDAEQIRLGRHSGRHGLFNRLEAMGYAVPEGHRDALYDRFLDLADRKKEVFEEDLEQMMNDFGGDAVAAATGLPDNGVALNGGTPAYRLDQFSVHLSSDDEAKVSVRLQRDDGSAREEQATGEGPVDALYRALDHAVDAPHTLVDYSIRSISEGADAQGEVEVTIRYGENQFAGTARNTDVIRASAEAYVDALNRLVAAQEHAESVEFVQNGIMHTYGE

SEQ ID NO: 832 - protein, 523 aa, Sulfitobacter sp. EE-36
MTDTTQQDRVLIFDTTLRDGEQSPGATMTHAEKIEIAGLLDEMGVDIIEAGFPIASEGDFAAVSEIAKLSKNSVICGLARAQFGDIDRCYEAIKHAAQPRIHTFIGTSPLHRAIPNLTMDEMADRIHETVTHARNLCDNVQWSPMDATRTELDYLYRVVEIAIKAGATTINIPDTVGYTAPRESADLIRKLLENVPGADEIVFATHCHNDLGMATANSLAAVEAGARQIECTINGLGERAGNTALEEVVMALKVRNDIMPFQTKIDSTKIMNISRRVAAVSGFAVQFNKAIVGKNAFAHESGIHQDGMLKNAETFEIMRPEDVGLTETNIVMGKHSGRAALRSKLENLGYELGDNQLKDVFVRFKELADRKKEIYDDDLIALMRTATDPESDRIVLGSMTVVCGTEGPQKAEMSLTVDGAETSTSQTGDGPVDAAFNCIKALVDHSARLQLYQVHAVTEGTDAQATVSVRLEEDGRIVTGQSADTDTVVASVRAYIHALNRLLVRREKGGTDKREISYKDVVG

SEQ ID NO: 833 - protein, 519 aa, Roseovarius nubinhibens ISM
MTKPDNDRVVIFDTTLRDGEQSPGATMTHDEKLEIAGLLDEMGVDIIEAGFPIASEGDFRAVSEIAKQAQNAVICGLARANLKDIDRCWEAVKHARQPRIHTFIGTSPLHRAIPDLTRDEMAERIHETVTHARNLCDNVQWSPMDATRTEWDYLCRVVEIAIKAGASTINIPDTVGYTAPVESADLIKRLIETVPGADDVVFATHCHNDLGMATANSLAAVAGGARQIECTINGLGERAGNTALEEVVMALKVRNDIMPWHTGIDTTKIMNISRRVSTVSGFVVQPNKAIVGKNAFAHESGIHQDGMLKNAETFEIMRPEDVGISGTSLPLGKHSGRAALRAKLKDLGIEVGDNQLKDIFVRFKDLADRKKEVYDDDILALVSVTGETSNHLELINLKVICGTGPAEAVLEMDVGGEEKSATCQGDGPVDATFKAVREIWPNDAKLQLYQVNAVTEGTDAQATVSVRLEEAGKIATGQSADTDTVVASARAYIHALNRLMVRQSRGGSDIPEVSYKDLT

SEQ ID NO: 834 - protein, 394 aa, Parvularcula bermudensis HTCC2503
MTYTPPETVRIFDTTLRDGEQSPGFSMTMKGKLRMARALSALKVDVIEAGFAAASPGDAEAVRAIAAEADGPIVCSLARVTERDIDAAAEALKDAKRKRAHVFIGTSPTHRRHKLKMRKGEILDAIDHGVRYARERFEDVEFSAEDAMRTEKTFLAEALRTAMEAGARTLNVPDTVGYFTPEETFQVFSYLIDAVEPEEGVVFSTHCHDDLGMAVANSLAAVRAGVRQIECTINGIGERAGNCAMEEAVMALRTRRDTYGVETTLDTTKFYDASRTLEDITGQKVQRNKAVVGRNAFAHEAGIHQHGMLSNRQTYEIMSPEDIGAPVSSLVLGKHSGKHALFARLEELGHEVPVDSRDAVFAAFKLLADEHHEVTDDMLRTLVAGASNRVVPAL

SEQ ID NO: 835 - protein, 231 aa, Asparagus officinalis
MGRGRVELKRIENKINRQVTFAKRRSGLFKKAHELSVLCDAEVALVVFSNRGRLYEFCSSSSVLKTIETYRKYSYAQAVPANEIQPKSYEEYLGLKGRVEILQRSQRNLLGEDLTPLSTKELEQLENQVAMSLKQIRLTKTQLMLDQLCDLKRKQHALQEASRDLEKKLHEPDSRNPVGFSWEGVVGARGSGSLPDCDPRRSDRFFQPLRIGSSSVCMDQWNAGDGPKTTN

SEQ ID NO: 836 - protein, 205 aa, Arabidopsis thaliana
IQKIDDSTSRQVTFSKRRKGLIKKAKELAILCDAEVCLIIFSNTDKLYDFASSSVKSTIERFNTAKMEEQELMNPASEVKFWQREAETLRQELHSLQENYRQLTGVELNGLSVKELQNIESQLEMSLRGIRMKREQILTNEIKELTRKRNLVHHENLELSRKVQRIHQENVELYKKAYGTSNTNGLGHHELVDQFMNPMHRLGCS

SEQ ID NO: 837 - protein, 398 aa, Frankia sp. CcI3
MPGPRFPSSSAPTVEPAAPVRFCDTTLRDGEQAPGVAFTAAEKLAIAAALDAIGVHQIEAGIPAMGPAERDVLREILATQPQAGVVAWCRADRRDIDAAVSCGIVTAHLTIPVSDLHLKSKLGRDRGWARRRIRDCVFDAADRGLRFSVGLEDASRADDNFVIELAGELREWGATRIRWADTVGLLDPVSAYTRLGRLVQAVPGEWEIHAHDDFGLATANTLAAVQAGFTWVSTTVLGLGERAGNAPLEEVAMALRHLLKVPVDLDTTSFRRLARMVARAACRPLPVGKAVVGESVFAHESGIHVHGVLRHPSTYEPFDPAEVGGQRRLAFGKHSGRASVRYALAQYGITADDSEIEPLLERVRTTATQTKRGLHGRDFQELLGRAEVPAPRVEAPPS

SEQ ID NO: 838 - protein, 540 aa, Synechococcus sp. RS9917
MAKDPGRVLIFDTTLRDGEQSPGASLNLEEKLAIAQQLARLGVDIIEAGFPFASAGDFEAVQRIAQQVGGAQGPIICGLARASRGDIKACADAVAPAPRRRIHTFIATSDIHLEHKLRKSRKEVLAIVPEMVAYARSLVDDVEFSCEDAGRSDPEFLYEVIEAAIAAGAGTINIPDTVGYTTPAEFGALIAGIDQHVPNIQEAVLSVHGHNDLGLAVANFLEAVKNGARQLECTINGIGERAGNAALEELVMALHVRRRYFNPFLGRDEESPTPLTAVRTEEITKTSRLVSNLTGMVVQPNKAIVGANAFAHESGIHQDGVLKNRLTYEIVDARTVGLSDNRISLGKLSGRSAVRARLEELGYDLSREDLDEAFARFKDLADRKREITDRDLEAIVSEQVQQPEARYQLKLVQVSCGSSLRPTATVTLADEEGREQTAAAIGTGPVDAVCRALNALAEEPNQLVEFSVKSVTEGIDAMGEVTIRLRRDGALYSGHSADTDVVVAAAQAFVNALNRLVAGASRSAIHPQRDHAVLETRPSL

SEQ ID NO: 839 - protein, 540 aa, Synechococcus sp. WH 5701
MAKDPGRVLIFDTTLRDGEQSPGASLNLEEKLAIAHQLARLRVDIIEAGFPFASPGDFNAVQRIAAAVGTPEGPVICGLARAARGDIKACAEAVAPAANRRIHTFIATSDIHLEHKLRKSRAEVVAITAEMVAYARSLVEDVEFSCEDAGRSDPHYLYEVIEAAIAAGATTINIPDTVGYTTPAEFGGLIAGIEAHVPNIDQAVISVHGHNDLGLAVANFLEAVKNGARQLECTINGIGERAGNASLEELVMALHVRRAYFNPFLGRQASSSEPLTGVRTEEIYKTSRLVSNLTGMAVQPNKAIVGANAFAHESGIHQDGVLKNRLTYEIVDARTIGLADNRISLGKLSGRSAFRARLEDLGYTLERDDLDEAFARFKELADRKREITDRDLEAIVSDQAQQTEARYVLKLVQVSTGTNLQPTATVTLTTSDGAELTEAAIGTGPVDAVCQALNSLARVPNELVEFSVKSVTEGIDAMGEVTIRLRHHGVLYAGHAADTDIVVAAAQAFVNALNRLVHGMERQPLHPQKASLPVAELPRL

SEQ ID NO: 840 - protein, 511 aa, Blastopirellula marina DSM 3645
MSDQRTIKIFDTTLRDGEQSPGASMNLPEKMEIAQALVDLGVDIIEAGFPIASPGDFEAVHEIASNIRGASICGLARCNDRDIDRAWEALKSAKSPRIHVFLATSAIHREFKLKMTPDEIVERAISGVARAAGYCDDVEFSPEDAARTEPDFLCRVVEAAIKAGATTVNIPDTVGYATPSHMGRVISDLVNRVPNIDQAVISVHCHNDLGLAVANSLAAVEAGAGQIECTINGIGERAGNCALEEIVMAMRTRNDYYNVDSRINTERLVPTSRLVSSVTGMQVQRNKAIVGRNAFAHEAGIHQDGMLKEPSTYEIMRPEDVGFAKTDLVLGKHSGRAALADRARSLGYHLTGEQLQVVFEQFKELADKKKEIYDGDISALCEQQIRGSDLTREWSLVSLEVSSGTKRQPNVKMTLAHAGEEHSAEVSEGDGPIDAAFWAVERITGVKLNCKDFQVRSATLGRDAQGTVTVDIDHNGTIFRGRGVSTDTVESTVLAILDAVNRICWKTAQPA

SEQ ID NO: 841 - protein, 381 aa, Staphylococcus aureus subsp. aureus NCTC 8325
MIRIQDNTIRDGMQQSNVRKSLIIKKEVLKQINKLNINSVEVGMCTTIEDEFNIHQFRDILSPEKELVVLTRLNEKEIKKIVKLKIHNLVVKILLPISDLHIKEKLNFSNKYYIQKIKDCLDILKKDKKGVDICFEDGTRTSREKLKEYMEIISKYQVRTVTFADTVGCSTPLEYGDIFNYFVKKYSNIIFSAHCHNDLGLATANTLAAILNGAKQIETTFLGIGERAGNAPIEEIITILTKKQIESTEFTLPDVYKTSINISKILDFQISENKPIIGENIFKHESGIHQDGTKKNINMYQYLVPSDLGLKNSQVVQFPISNISSKKILHNKFKSIVNTEEIDENISFYKLVNKFSPEVAPEDTVDLLQIIKRRSKDGNFK

SEQ ID NO: 842 - protein, 253 aa, Rumex acetosa
MEFSNELSRDMEDGSPQRKMGRGKIEIKRIENVTNRQVTFCKRRNGLLKKAYELSVLCDAEVALIVFSSRGRLYEYANHSVKATIERYKKTCSDSTGVTSVEEANAQQEAAKLRNQIRTLQNQTRNTSRNLMGEGLTSMNMKDLKNLETRLEKGISRVRAKKNELLFGEIEFMQKKEIELHNNNQFLRAKIAESERSQQSMNLMPGSSSGEQHYELMPQSQAGPFDSRNFFQVSDLQPDERYSCQNQTPLQLV

SEQ ID NO: 843 - protein, 505 aa, Robiginitalea biformata HTCC2501
MEKRRIEIMDTTLRDGEQTSGVSFTASEKLTLAKLLLEELRVDRIEVASARVSEGEFDSVRQITAWAAEKGLLPRVEVLTFVDGGASLNWMEQAGAQVQNLLTKGSLNHLKYQLKKTPEKHFSDIREVIAKAGEQGVRTNIYLEDWSNGMRNSPEYVYEFLDFLDTQPIDRIMLPDTLGVLTPGETREFLEDIIGRYPDGHIDFHGHNDYDLSVANVMEAVSAGVHGLHLTVNGMGERAGNAPLASVVAVLNDFMPEVAIGVSETSLFKVSKLVSAFTGIGIPANKPIVGDNVFTQTAGIHADGDNKKNLYFNDLMPERFGRKRKYALGKTSGKANIQKNLQELGLTLNDEELRKVTARIIELGDKKEKVTREDLPYIISDVLGSGSHQQRVFIRSYVLTHAKGLQPSTTVSLEIEGENYEAHAQGDGQFDAFMNALRKVYRSLKRPLPTLVDYAVRIPPGSNSDALCETVITWRQDDREFTTRGLDSDQTVSAIKATEKMLNIG

SEQ ID NO: 844 - protein, 390 aa, Robiginitalea biformata HTCC2501
MSKDKVQIFDTTLRDGEQVPGCKLDTEQKLIIAERLDALGVDVIEAGFPISSPGDFKSVSEISRLVKNATVCGLTRAVKKDIEVAAEAIKDAKKPRIHTGIGTSESHIKYKFNSTQDEVLRRAVEAVKYAKTFVEDVEFYAEDAGRTENEFLARICEAVIQAGATVLNIPDTTGYCLPEEYGAKMKYLRENVRDIDKAILSCHCHNDLGLATANSIAGVINGARQIECTINGIGERAGNTSLEEVVMILRQHPHLNLDTGINSKLLYDTSQMVSRKMGMPVQPNKAIVGSNAFAHSSGIHQDGVIKKRETYEIIDPVDVGVTESSIVLTARSGRAALAYRAKKVGYELTKLQLDKVYDQFLVFADRKKEIEDADIHSIVEASGVNIESIA

SEQ ID NO: 845 - protein, 540 aa, Synechococcus sp. WH 7805
MAHDPGRVLIFDTTLRDGEQSPGASLNLEEKLAIAQQLARLGVDVIEAGFPFASPGDFAAVQRIAQQVGGEQGPIICGLARASRGDIKACADAVAPAPRRRIHTFIATSDIHLEHKLRKSRQEVLAIVPEMVAYARSLVDDVEFSCEDAGRSDPEFLYEVIEAAIAAGASTINIPDTVGYTTPAEFGALIAGIDQHVPNIADAVLSVHGHNDLGLAVANFLEAVKNGARQLECTINGIGERAGNAALEELVMALHVRRRYFNPFFGREDDSPTPLTGVRTEEITKTSRLVSNLTGMVVQPNKAIVGANAFAHESGIHQDGVLKNRLTYEIVDARTVGLTDNRISLGKLSGRSAVRARLEELGYDLSREDLDDAFARFKELADRKRDITDRDLEAIVSEQVQQPDARYQLTSVQVSCGSNLQPTATVTLLDEEGQEQSEAAIGTGPVDAVCRALNALAGEPNELVEFSVKSVTEGIDAMGEVTIRLRRDGQLFSGHAADTDVVVAAAQAFVNALNRLVAGSLNPALHPQRDATPLDASPTL

SEQ ID NO: 846 - protein, 515 aa, Pseudoalteromonas tunicata D2
MSDKVWIFDTTLRDGEQALKASLTEDDKLQLAHTISRLNVDVMEVGFPVSSPADFRSVQRIATEVKGPIICGLARAVVKDIEACGEALRPAEQRRIHTFIATSPLHLEHKLRMSLDQATEMAVKSIKLARNYTDDVEFSCEDAGRTPHDDLCRIVERAIAAGASTINLPDTVGYVTPQEYAAMISHLMNNVPNIDKARLSVHCHNDLGLAVANSIAAVQAGARQIECTINGIGERAGNCSMEEVAMILKMRHDYLNLHTDINSEEIYRASRQVSQICNMPVQPNKAIVGENAFAHSSGIHQDGVLKAQNTYEIMSPETVGVPSNQLNMTSRSGRHVIQHRLSELGYQTGDYDMESLYESFLALADQKGTVYDYDLEAMIHFNKISDKDDYYQLDFVNSTSNSQSVASSTVGLVIGGEKVSEAATGNGPVEASYKAIKRITAMDVEVIEYNLDATGAGESSLGQVDIIAKFDGKQYHGAGLAADIVEASVRAMVRVYNLIYRAQQVSDIKQQRKAG

SEQ ID NO: 847 - protein, 227 aa, Phalaenopsis hybrid cultivar
IKRIENTTNRQVTFCKRRNGLLKKAYELSVLCEAEIALIVFSSRGRVYEYSNNSIKATIEKYKKTCAGSSNPGSLVEVNSHQYYQQESAKMRHQIQLLQNSNRHLMGDGLSSLNLKELKQLENRLERGITRVRSKKHELLFAEIEYMQKREVELQNDNMYLRAKIADNERAQQANIVQAGVDFESIPSFDSRNYYHINMLESASHYSHHQDQTALHLGYETKADQSA

SEQ ID NO: 848 - protein, 521 aa, Oceanicola granulosus HTCC2516
MSQDNRVRIFDTTLRDGEQSPGATMTHAEKLEIAELLDEMGVDIIEAGFPIASEGDFRAVSEIARQAKNATICGLARANFKDIDRCWEAVRHARSPRIHTFIGTSPLHRAIPNLDQDQMAERIHDTVTHARNLCGNVQWSPMDATRTEWDYLKRVVEIAIKAGATTINIPDTVGYTAPNESAELIRRLIAEVPGADEVIFATHCHNDLGMATANSLAAVEGGARQIECTINGLGERAGNTALEEVVMALKVRHDIMPFTTGIDTTKIMNISRRVATVSGFAVQFNKAIVGKNAFAHESGIHQDGMLKNAETFEIMRPADVGLGETSLVMGKHSGRAALRAKLKDLGFDLADNQLNDVFVRFKDLADRKKEVYDEDLVALVRQNEGAEDSVRLVSLRVVCGTGGPAEAEMVLEVDGAEKSGTARGDGPVDSAFNAIKALYPHDVRLPLYQVHAVTEGTDAQATVTVRLEEDGRIATGMSADTDTVVASTKAYINALNRLIVRRQKTAPGADVKEISYRDVGE

SEQ ID NO: 849 - protein, 514 aa, Photobacterium sp. SKA34
MKDQVIIFDTTLRDGEQALSASLTVKEKLQIAYALERLGVDVIEAGFPVSSPGDFESVQTIAKHIKNSRICALSRAVAKDIDVAAKSLKVAEAFRIHTFISTSTVHVQDKLRRSYDDVIDMGVAAVKRARNYTDDVEFSCEDAGRTPIDNLCRMVEAAIDAGANTINIPDTVGYTLPSEFGGIITQLFNRVPNIDKAVISVHCHDDLGMSVANSMAAVQAGARQVEGTINGLGERAGNCSLEEIAMIIKTRQELLGVTTNIKHNEIHRTSKMVSQLCNMPIQANKAIVGANAFSHSSGIHQDGMLKNKNTYEIMTPESIGLKNQALNLTSRSGRAAVKSHMDALGYTENEYSLDKLYADFLKLADRKGQVFDYDLEALMHFSNLRDEDDYFKLNYLSVQSGSVMATTSIKLLCGDEEKCEAAVGNGPVDALYQCIYRLTGYDIVLDKFDLTAKGEGEDGLGQADIIANYKGRKYHGTGLATDIVEASGQALLHVINSIHRADQIEEIKQRSATH

SEQ ID NO: 850 - protein, 513 aa, Neptuniibacter caesariensis
MSNDNRVIIFDTTLRDGEQSPGASMTRDEKLRVAKQLEKMRVDVIEAGFAIASPGDFESVKTIAEAVTESRVCSLSRALDADIDRAGEALQNAAMGRIHTFIATSPIHMKYKLQMEPDQVVEQAVKAVTRARNLIDDVEFSLEDASRSELDFMCRIIEKVIDAGASTINIPDTVGYAVPEEFAHTIGQLVQRIPNADKAIFSVHCHNDLGLAVANSLAAVGAGARQVECTINGLGERAGNASLEEIVMAIRTRKDTLGLETNIDTTQIVPASRLVSSVTGFPVQPNKAIVGANAFAHESGIHQDGVLKHRETYEIMTAQDVGWNTNRMVLGKHSGRAAFRSRLEELGTTFATDSELNNAFSRFKDLADKKHEIFDEDLVALVSDTRAEASSEQFKLSSLSVTSQTGETPVAKIVMQVGNEERRAESTGSGPVDATFKAIESIAESGASLQIYSVNAVTEGTDSQGEVTVRLENGGRIVNGLGADTDIIIASAKAYIHALNMLDANVQKAHPQV

SEQ ID NO: 851 - protein, 204 aa, Persea borbonia
TNRQVTFCKRRNGLLKKAYELSLLCDAEVALIVFSSRGRLYEYANNSVKTTIERYKKASADTSNGGSTTEVNSQFYQQESSKLRQQIGILQNANRHLMGEALSSMTVKELKQLETRLEKGISRIRSKKNELLFAEIEYMQKREVDLQNDNLYLRAKIAENERAQQHMNMLPAPEYDVMPAFDSRNFLQVNLLEPNNHYSHQEQT

SEQ ID NO: 852 - protein, 289 aa, Capsella rubella
MMLEKDDLGLSLGLNYPKKQMNLNSNPSVSVTPSSSSFGLLRRSSLNESFTSSVPNSDSSQKETRTFIRGIDVNRPPSTAEYGEEDAGVSSPNSTVSSSTGKRSEREEDTDPQGSRGGISDDEDGDNSRKKLRLSKDQSAILEETFKDHSTLNPKQKQALAKQLGLRARQVEVWFQNRRARTKLKQTEVDCEFLRRCCENLTEENRRLQKEVTELRALKLSPQFYMHMSPPTTLTMCPSCEHVSAPPPQQPPQAATSAQHHRGSLPVNAWAQGTRISHGLTFDALRPRS

SEQ ID NO: 853 - protein, 272 aa, Francisella tularensis subsp. holarctica
MDALRPSLAIGKARVHMYLPVDPNLAQASLGSKNDNEQNIKNVYELVKLASDEGFEVEFSAEGYSRLGDTFDYVTNIFRAAVAAGVKVINCPDTIGGACERENDNYFVKNMAKHAEIIKKEFPDRNIIWSAHCHNDLGLALENSMNAVFDGPARQVEGCINGVGERAGNAPLEQCVMFINLFGKQKDYHYYNDVNIAHFKTISDFIGKRMLSRQPHHPITGLNSARHTSGGHTNAILKNPIAYQPFHPESVGNEISFIFGPLSGGNHAKKII

SEQ ID NO: 854 - protein, 248 aa, Brassica oleracea
MGKEDLGLSLSLGFSQHNNPSSSISNNLHRFPWNQTLASTSDLRKIQVNTLPSTVDCEEEAGVSSPNSTISSTISGGKRSEREGTDEEEDAGGETSRKKLRLSKDQSAFLEETFKEHNTLNPKQKLALAKKLSMTARQVEVWFQNRRARTKLKQTEVDCEYLKRCVEKLTEENRRLQKEAMELRTLKLSPQFYGQMTPPTTLIMCPSCERVAGPSSNHHQTHRPVAINPWVPRAGQVAHGLDFEALRS

SEQ ID NO: 855 - protein, 274 aa, Brassica oleracea
MMMRKEDLGLSLSLGLSQDHTPLQSQNPNSSISNNLHRFPWNQTFASTSDLGKIDVNSLPRTVDCEEEPGVSSPNSTISSTISGGKRSEREGISEHDEITPDRGYSRGNSDEEEDGGETSRKKLRLSKDQSAFLEGTFKEHNTLNPKQKLALAKKLNLTARQVEVWFQNRRARTKLKQTEVDCEYLKRCVEKLTEENRRLQKEAMELRTLKLSPQFYGQMTPPTTLIMCPSCERVAGPSSNHQHNHRPVPVNPWVACAGQVTHGLNFEALRPRS

SEQ ID NO: 856 - protein, 273 aa, Brassica oleracea
MGKDDLGLSLSLGFAQNQHPLQLNLKPTSSPMSNHQMFPWNQTFVSSSNHQNHQSLRKIDVNSFPSTVELEEETGVSSPNSTISSTVSGKRRSERQGSGDDLDIALDRSSSRGTSDEEEEYGGEACRKKLRLSKDQSAVLEDTFKEHNTLNPKQKLALAKKLGLTARQVEVWFQNRRARTKLKQTEVDCEYLKRCVEKLTEENRRLEKEAAELRALKLSPGLYGKMSPPTTLLMCPSCERVGGPSNHSQRSVSLNPWLQMAHGSTFDVKHPRS

SEQ ID NO: 857 - protein, 277 aa, Brassica oleracea
MGKEDLSLSLSLGFAQTHHPLKLNLNPTSSSISNLQMFPWNQTFVSSSDHQNQQFFTKIDVNSLPSTVHLEEETGFSSPNSTISSTVSGKRRSEREGTSGGAGDDLDVTLDRSSSRGTSDEEEEHGGEACRKKLRLSKDQSAVLEDTFKEHNTLNPKQKLALAKKLGLTARQVEVWFQNRRARTKLKQTEVDCEYLKRCVEKLTEENRRLEKEAVELRALKLSPRLYGHMSPPTTLLMCPSCERVAGPSNHNQRSVSLSPWLQMAHGSTFDVVHPRS

SEQ ID NO: 858 - protein, 387 aa, Desulfitobacterium hafniense Y51
MEERKLTIVDTTLRDGEQTAGVVFSNQEKLMIARMLDDLGVHQIEAGVPVMGGDEQKAIRDIVKMGLKASIMGWNRAVIADIEKSIECGCDAVAISISTSDIHIEHKLMTTREDVLARMVKAAEFAKRNGLYISVNAEDASRSDLDFLLEFARQAKEAGADRLRYCDTVGILEPFTTFERITKIKETIDIDVEMHTHNDFGMATANALAGVKAGASHIGVTVNGLGERAGNAALEEIVMALKYLVGVDLKFATERFVEVSEFVARASGRSVPAWKAIVGSNMFAHESGIHADGALKNPLTYEVFKPEEVGLERQIVIGKHSGTSAIKAKFRNEYGKEISEEEANELLARVRAFAVDMKRSLFDKELMYIYEDLHREAENRQPNPKWF

SEQ ID NO: 859 - protein, 515 aa, Saccharophagus degradans 2-40
MQKDKLVIFDTTLRDGEQSPGASMTQEEKIRIAKMLEKMRVDVIEAGFAIASPGDFAAVKAVAEAVKDSRVCSLARALDGDIDRAAEALKGANASRIHTFIATSPIHMKHKLKMEPDAVLAQAIHAVKRARSYTDDVEFSLEDGSRSEFDFMCRITEAAIAAGARTINVPDTVGYGEPGEYGAMFKRLIEAVPNSDLAIFSTHCHNDLGLAVANSLSAVMNGVRQIECTINGLGERAGNAALEEVVMAVRTRKDLFPVETNIVTEHIVPTSRLVSTITGFPVQPNKAIVGANAFAHESGIHQDGVLKHRETYEIMRAEDVGWNTNKIVLGKHSGRAAVKARFEDLGITFDTPEALSEAFARFKALADKKHEIFDQDLQALVSEADNASREEKYKLVALEVVCKTGQNPHAQLTLSIGGELVEASSEGGGPVDAAYKAIESVVNSHTDLLLYSVNNITQGTDSQGEVTVRLERNGNIVNGIGADTDIVTASIKSYLDALNLLESNKSRAHPQREGV

SEQ ID NO: 860 - protein, 514 aa, Vibrio angustum S14
MKDQVIIFDTTLRDGEQALSASLTVKEKLQIAYALERLGVDVIEAGFPVSSPGDFESVQTIAKHIKNSRICALSRAVAKDIDVAAESLKVAEAFRIHTFISTSTVHVQDKLRRSYDDVIDMGVAAVKRARNYTDDVEFSCEDAGRTPIDNLCRMVEAAIDAGANTINIPDTVGYTLPSEFGGIITQLFNRVPNIDKAVISVHCHDDLGMSVANSMAAVQAGARQVEGTINGLGERAGNCSLEEIAMIIKTRQELLGVTTNIKHDEIHRTSKMVSQLCNMPIQANKAIVGANAFSHSSGIHQDGMLKNKNTYEIMTPESIGLKNQALNLTSRSGRAAVKSHMDALGYTEKEYSLDKLYADFLKLADRKGQVFDYDLEALMHFSNLRDEDDYFKLNYLSVQSGSVMATTSIKLLCGDEEKCEAAVGNGPVDALYQCIYRLTGYDIVLDKFDLTAKGEGEDGLGQADIIANYKGRKYHGTGLATDIVEASGQALLHVINSIHRADQIEEIKQRSATH

SEQ ID NO: 861 - protein, 248 aa, Cleome spinosa
MGRGRVELKRIENKINRQVTFAKRRNGLLKKAYELSVLCDAEVALIIFSNRGKLYEFCSSSNMLKTLERYQKCSYGSIEVNNRPAKELENSYREYLKLKSRYEGLHRQQRNLLGEDLGPLNSKELEQLERQLDSSLKQVRSIKTQSMLDELSDLQNKEQMLLEANRALSMKLEEMVGARTHQFGGAWEGSEQNVSYGHQAQSQGLFQPLECNPTLQIGYNNPVCSEQMAATTQAPVQAGNGYIPGWML

SEQ ID NO: 862 - protein, 501 aa, Candidatus Kuenenia stuttgartiensis
MDNIIIFDTTLRDGEQSPGASLDIGEKLQIARQLALLNVDVIEAGFPIASPGDFQSVSNIAKEIRGVSIAALARAMEKDIDSAAKALEKAEKPRIHIFLATSEIHRKYKLLKAKDEIINLAVKAVAYARKFVEDIEFSSEDASRTEMDFLAQVVESVIAAGATTVNIPDTVGYAVPEHYASIITGLKEKVKNISKAVLSVHCHNDLGLAVANSLAAVKAGAKQVECTMNGLGERAGNAALEEVVMAIKTRQDYYRCSTRIKTRELTNSSRLVSVLTGMRVQRNKAIVGENAFAHQSGVHQDGVLKERTTYEIMHPEDIGLQKTKIVLGKLSGRHAFKERIKELGYDLTEIEFEKAFEEFKRLADKKKEIFDEEIEAIIDTEKMEIPHIFQLESLSISCGPNVVPTAGVRIRLSDGSVADNATIGDGPIDALFKAIDLATGISGKLLDYHIQAITSGKDAMGEVYVNVDIHGKNVKGRAVSTDIIEASAKAYLNALNKVAAK

SEQ ID NO: 863 - protein, 534 aa, Candidatus Kuenenia stuttgartiensis
MSIKIVTTTLIMDRIFIYDTTLRDGSQAEGVSFSLQDKLAITVKLDELGIDFIEGGFPIANPKDESYFKEVKSLSLKHSKIASFGSTRKVGVRTEEDKNVNALLFAETPVVTIVGKSWDFQVTDVLKTTLDENVKMVTDTILFLKSRNREVFFDAEHFFDGFKSNRGYALKVINEACSAGADVIVLCDTNGGSLPDEIATIVEEVRKNNKCILGIHAHNDGDLAIANTIMAVNKGVRQVQGTINGIGERCGNADLCSVIPNLVLKMGYHCLHNDGLRKLTEISRYVYETANLLFRTNQPFVGSSAFAHKGGLHINAIQKNKVTYEHINPESVGNKRKILISELSGSATILSKTEKFNLTHDTALLRSILEEVQNLENEGYQLESAEASFELLVRKKTGKYKPFFELEGFRVIVEKRENGLPITEATVKINVNNTQELTASEGSGPVNALDTALRKALERFYPVLKDMKLLDYKVRVINPRSATAAKVRVIIESKDKENVWSTVGVSGNLIEASWQALVDSIEYKLIKEYEAKQL

SEQ ID NO: 864 - protein, 458 aa, Candidatus Kuenenia stuttgartiensis
MLRLNKQRNTLEPEEHHFELKDSEEPNLFRDIFPYDKVPKIPFNYRLNPMNMPEEIWITDTTFRDGQQSMPPYTVKQIVDLFDMIHKLGGKRGLIRQCEFFLYNEKDKEAVRKCMERGYKYPEITGWIRAVKSDFKLAKEMGLKETGILCSSSDYHIYLKLKKTRKQALEMYLDIVRAALEEGMIPRCHFEDITRADLYGFVIPFAKELMKLSRESGIPIKIRACDTMGVGVSYPGAAPPRSVPGIIYGLTHFADVPSECLEWHGHNDLYLAMSNATASWLYGCSAINGALLGLGERTGNTPLEALVIEYLALRGNDDEIDTTVITDIADYYRNEIGYQIPPNQPLVGSGFNVTRAGIHSDGLLKNEEIYNIFDTTKLLKRPVGVSITDKSGVAGIVQWIDIYYKLQGDERISKDHPGVVKIKEWVDEQYAMGRITSVSEKEMVELVNIHLKDVFAGR

SEQ ID NO: 865 - protein, 522 aa, Candidatus Pelagibacter ubique HTCC1002
MSDKDKVIIFDTTMRDGEQSPGASMSIEEKIQIARIFDELGIDVIEAGFPIASPGDFEAVTAISKILKNSIPCGLSRASKKDIDACHEALKASPRFRIHTFISTSPLHMKHKLNKTPEQVLDAIKESVTYARNLTDDVEWSCEDGTRTDMDFMCKIVETAISSGAKTINIPDTVGYTIPSEFTKIITTLKNKVPNIDKAILSVHCHNDLGLAVANSLAGVQAGARQVECTINGIGERAGNAALEEIVMAIRTRNDLMPFTTGIKTELLSKASKVVSNATFPVQFNKAIVGKNAFAHEAGIHQDGMLKNRETYEIMTPESVGVKKTSLVMGKHSGRHAFKEKLNDLGYADVTDDVIQSAFGKFKVLADKKKHVYDDDIMALVDDSLISDNKINAINLKSLKVFAGTGEPQKAEMTLDVYGEVKSTSETGDGPVDAIFKCIKVLYPHDVKLQLYQVHAVTEGTDAQATVSVRIEEEGKTTVGQAADTDTLVASANAYLSALNKMIIKRKKTVPMEHETQKVKGI

SEQ ID NO: 866 - protein, 485 aa, Methanococcoides burtonii DSM 6242
MDTTLRDGEQTPGVALKTEEKVWIARKLDELGVDIIEAGSAITSEGEREAIRAVAAEGLDAEICSYCRIMQQDVDFALECDVDSIHLVAPVSDLHISVKLKKDREALKEMALSAVEYAKDHGLIVELSGEDASRADLDFLKDLYKSGVEVGADRVCFCDTVGLLVPERTTEIFKDLSSSIDVPVAVHCHNDFGLAVSNTVAALNAGAREAHMTINGIGERAGNAALEEVAMILEWLYKRETSIKTNELYKVSRLVSRLTGLAVAPNKSLVGGNAFTHEAGIHVHGLLADTSTYEPITPESIGRERQIVLGKHAGKSSVTLALKEQGLNVDDSQLNEIVSRVKELGDHGKRVTDADLQTIAETVLDIYRESKVKLEDLTVVSGNRATPTASVRLIVDGKEIVEAATGDGPVDAAFEGIRKAVSGVADIHLEEYHVDAITGGTDALVEVLVKLSKDGKMVTSRGARTDIIMASVEAVINGINQLIQD

SEQ ID NO: 867 - protein, 389 aa, Methanococcoides burtonii DSM 6242
MANTDYSKNELMNFIDQSPLDIEICDVTLRDGEQTPGVAFTRDEKIDLALELDSIGVEVIEAGFPVVSTSEKDIVKEISNLGLDASICCLARSVIDDVDAAIDCDVDIVSIFIAMSDLHLKFKYHKSCADVFSCAMGAIEHAKDHGLKVRFAAEDATRTNIETLKRAFLAAEDYHVDYVSIADTIGILSPATTHYLVSEIKKVVHTPICIHCHNDLGMATANTLVAAEAGAKQLHTTINGIGERAGNASLEELLVALRVQHGIETYDTTKLNSISRKLEEYSGLPTAVNKAVVGKYAFTHESGIHVMAILEEPRTYELFTPEMVGGKRNLVVGKHTGKKALKGIVNDLGYELDNDELCELINKVKNCTEVKKGISRERLEEMIRNVQSH

SEQ ID NO: 868 - protein, 425 aa, Methanococcoides burtonii DSM 6242
MKLYKTYEDLPKIKLPKGQEVSISDSTLRDGAQMPGIVLKVDHKVKIYEYLHNIGIEKLETFVYNDRDRNAISMMLDRGYEFPEVTGWARAATSDIDLVLDIGAIEETGILMSVSDVHIFDKMGLPSREAAEEKYLDALQYAVDHGLRTRAHIEDMTRADNTNFVYPMIKKILEIDPKCTIRLCDTIGFGIPFVDVEEPFGIPEMVRHVKEELKAVNIETHCHDDFGLAVANSIAGYWHGANWSNVTFLGIGERAGNAELEKLLLFLERRIEGFDKYDLKSLFEFAKFMEREIGIRIPRNKSIVGNNVFAHESGIHTAGVIKNPFTYEPYPPEVVGGKRAFLIGDSSGIEVLRFKVEDTLHDLLDVKISVEKNDPRLRAIQADIQNLYNNEKRVSCISDEEIQAYVEKYFLFEPIVEKSMGRKTL

SEQ ID NO: 869 - protein, 442 aa, Methanococcoides burtonii DSM 6242
MESVRNIANAGLTSEVCGLARVLTKDLDACIDAGVGMIHTFVSTSDIQRIHTIKKSREEVVEMSVNAVQYIKDHGMRCMFSAMDATRTDLDYLIEVYRAVEDAGCDIINVPDTVGIIAPSGMYRLISKLDKEMNIPIDTHCHNDFGLAVANSLMAIEAGASQAQVTVNGLGERAGNADLAETVMSLHSIYGAKTSINTEYIVETARMVERYTGVQIPPHMPVVGENAFAHESGIHTHGVLENSDTFEPGIMTPEMVGHTRRIVLGKHAGKHAVLRSLQSANINPTEDQLDAIIKKVKMLADKGKRITDSDLYTIAFDILGKPEGMPAIDLKEVSVMTGNITTSTAVVKALFNGKECVTSNVGIGPVDAALKAVETLIGQHAKVTIHDFRIEAVTGGSDALAEVVIGVQNDNGRIVTARAANADIVLASVEALVTAINMLLKK

SEQ ID NO: 870 - protein, 515 aa, Methylobacillus flagellatus KT
MEFQAMTQNQLIIFDTTLRDGEQSPGAAMTKEEKLRIARQLEKLGVNVIEAGFAAASPGDFGAIRAIAEAITETTVCSLARANENDIRRAGEAIQPAKKRRIHTFIATSPIHMQNKLRMTPEQVLDRAVQAVQWALEYTDDVEFSAEDAVRSDIDFLVQVFDAVIAAGAKTINVPDTVGYSVPGQWGERMAQLIARVRNSDKVIWSTHCHNDLGMAVANSLSAVLAGARQVECTINGLGERAGNASLEEIVMAVKTRRDVFQLETTIDTTQIVATSKLVSTITGYPVQPNKAIVGANAFAHESGIHQDGVLKHRETYEIMRAEDVGWGANKLTLGKLSGRNAFRTRLTELGITLESEDALNAAFARFKELADKKSEIFDEDIQALVSDNVVNEENFKLGYLHVASQTGETPHAEVVVLENGVEHRADATGGGPVDAAFKAIEKIVRSGAELLLYSVNNITSGTDAQGEVTVRLSKGGRVVNGQGADTDIVIASAKAYLNGLNKLHAYAERAHPQV

SEQ ID NO: 871 - protein, 378 aa, Burkholderia xenovorans LB400
MSNPIINDTTLRDGEQTAGVAFTIAEKCAIAEALARAGVPELEIGIPAMGDEEIDCIQTIVALNLDADLMVWGRLTDADLASALRCNPDIVHLSIPVSDIHLQHKLRQPRSWVLAQINRVIGAAVRSGRKVSLGAEDASRADPAFLADVARRAQQCGAQRIRFADTLGVLDPFSTYEAIARLRDAVDLEIEIHAHNDLGLATANTLAALRAGATHANTTVNGLGERAGNAALEEIVMGVRHIMGRDTAVDTTALLGISRLVERASGRPVALNKSIVGGGVFTHESGIHTDGLAKNASTYESFDPAELGRERSVVLGKHSGSQSVRQAYDALGLPVSDTLVALLLTRIRHHATHHKQAPSAADLYRFLIEARDTVGELS

SEQ ID NO: 872 - protein, 515 aa, Burkholderia xenovorans LB400
MSDKLIIFDTTLRDGEQSPGASMTKEEKIRIAKQLERMKVDVIEAGFAASSNGDFDSIHTIAGLIKDSTICSLARANDKDIQRAADALKPADRFRIHTFIATSPLHMEKKLRMTPDQVFEQAKLAVRFARKFTDDVEFSPEDGSRSDMDFLCRVLEAVIAEGATTINIADTVGYGVPELYGQLVKTLRERIPNSHKAVFSVHCHNDLGMAVANSLAGVQIGGARQVECTINGLGERAGNTSLEEIVMAVKTRRDYFGLDVGLDTTQIVPASKLVSQITGFVVQPNKAVVGANAFAHASGIHQDGVLKARDTYEIMRAEDVGWSANKIVLGKLSGRNAFKQRLQELGIALDSEGELNTAFARFKELADRKSEIFDEDIIAIVTEESAEAQEKEHYKFLSLSQHSETGEQPHAKIVFSVEGKEVTGEARGNGPVDATLNAIETEVGSGSELLLYSVNAITTGTQAQGEVTVRLSKSGRIVNGVGTDPDIVAASAKAYISALNKLYSNVDKLNPQRSE

SEQ ID NO: 873 - protein, 513 aa, Polaromonas sp. JS666
MTDKLIIFDTTLRDGEQSPGASMTKDEKLRIARQLERLKVDVIEAGFAASSNGDFEAVQAIANTIRDSTICSLSRANDRDISRAAEALKGANNARIHTFIATSALHMEKKLRMTPEQVLEQARLSVRFARNLVADVEFSPEDGYRSDVDYLCRVLEAVIDEGATTINVPDTVGYAVPELYGHFIKTLRERVPNSDKAIWSVHCHNDLGMAVANSLAGVMIGGARQVECTINGLGERAGNCSLEEIVMAVKTRKDYFNLEMNIDPLHIVAASRMVSQTTGFVVQPNKAVVGANAFAHASGIHQDGMLKARETYEIMRAEDVGWSASKMVLGKLSGRNAFKQRLQDLGVALESEADINTAFARFKELADRKSEIFDEDILALVSDESITHHDQEQYGFVSLAQHSETGERPHAVVVFTVAGKEIRGESDGNGPVDASLKAIETHVKSGAEMVLYSVNAISGSTESQGEVTVRLQNNGRVVNGVGADPDIVVASAKAYLSALNKLQSKADRVAAQG

SEQ ID NO: 874 - protein, 171 aa, Glycine max
KKLRLSKDQSIVLEESFKEHNTLNPKQKLALAKQLGLRARQVEVWFQNRRARTKLKQTEVDCEFLKRCCENLTEENRRLQKEVQELRALKLSPQFYMHMTPPTTLTMCPSCERVAFPPPLPLILPRVTITCLHLTPGPFPLAHGQALRCPPSQILDSRKQNDKIEKKDRKP

SEQ ID NO: 875 - protein, 265 aa, Hordeum vulgare subsp. vulgare
MGRGPVQLRRIENKINRQVTFSKRRSGLLKKAHEISVLCDAEVALIVFSTKGKLYEYSSQDSSMDVILERYQRYSFEERAVLDPSTGDQANWGDEYGSLKIKLDALQKSQRQLLGEQLDPLTTKELQQLEQQLDSSLKHIRSRKNQLLFESISELQKKEKSLKDQNGVLQKHLVETEKEKNNVLSNIHHREQLNEATNIHHQEQLSGATTSSPSPTPPTAQDSMAPPNIGPYQSRGGGDPEPQPSPAQANNSNLPPWMLRTIGNR

SEQ ID NO: 876 - protein, 507 aa, delta proteobacterium MLMS-1
MSEKIIVFDTTLRDGEQSPGASMNIHEKYRLAQQLTKLGVDVIEAGFPAASLGDFECVKNIADNIRGTQIAALCRCNPKDIDTAWQALKNGENPRIHTFLATSEIHMQHKLRMSPEQVVERAAAMVAHAAQYTGNVEFSAEDASRSDLDFVCRVFAAVIEAGATTLNFPDTTGYALPDEFGAKIRYLVENVPNIDKAVLSVHCHNDLGLAVANSLAAINNGARQVECTVNGLGERAGNTAMEEVVMILRTRAETSPYHTDIVTEHIYPSSRLVSTITGMPVQPNKAIVGANAFRHESGVHQDGVLKERTTYEIIDPKDVGISIGNIVLGKHSGRHALRDKVLELGYGDLSEEEVERVFKRFKEVADRKKEMFEEDLEAIIMDEVLRVPESFKLLHLGSMSGSMSLPTAAVRMRVNDQEKETAVLGVGAIDATFRAIAELTGTGSKLLYFSVSSITGGTDAQGEVMVRVEDNGKLVIGQGADPDIITAAAKAYLMALNRLEFLKKQLQ

SEQ ID NO: 877 - protein, 513 aa, Ralstonia metallidurans CH34
MSDKLIIFDTTLRDGEQSPGASMTREEKIRIARQLERLKVDVIEAGFAASSNGDFEAIRSIAQVVKDSTICSLARANDKDIARAAEALKPANSFRIHTFIATSALHMEKKLRMTPDQVYEQARLAVRFARQFTDDIEFSPEDGSRSDMDFLCRVLEGVIAEGATTINLPDTVGYAVPEGYAELIRSVRERIPNSDKAVWSVHCHNDLGMAVANSLAAVKLGGARQIECTINGLGERAGNTSLEEVVMAVKTRRDYFNMDVGIDTTQIVPASKLVSQITGFVVQPNKAVVGANAFAHASGIHQDGVLKARDTYEIMRAEDVGWTANKIVLGKLSGRNAFKQRLQELGVQLESEAEINAAFARFKELADQKAEIFDEDIMAIVSDEEQEHANEHYRFISLSQRSETGERPHARVVFNIDGSEQTGEAEGNGPVDATLHAIEGKVNSGAELVLYSVNAITAGTQAQGEVTVRLSKAGRIVNGVGTDPDIVAASAKAYLAALNKLHDKAVQKINPQI

SEQ ID NO: 878 - protein, 511 aa, Oceanobacter sp. RED65
MSELIIFDTTMRDGEQSPGASMTLDEKVRIGKALEKMRVDVIEAGFAAASIGDFESIAAVAKAVKESTICSLARAVDNDIDRAAEALKQAERARIHTFIATSPIHMEHKLRMSPDQVVERAVYAVKRARSHVADVEFSCEDAGRSDMDFLCRVIEAAIDAGASTINIPDTVGYAIPEEFGYKIKTLLERIPNADKAIFSVHCHNDLGLAVANSLAAVSNGARQVECTINGLGERAGNAALEEIVMGVKTRPDLFDVQTNIDPQFIVPTSRMVSTITGFPVQPNKAIVGANAFAHESGIHQDGVLKHRETYEIMKAEDVGWGANRMVMGKHSGRAAFRSRLEELGVTFESDQDLNKAFAQFKELADKKHEIFDEDLQALVSAARNMDDKYQLVTLEAHSQTGESPTAKLTITVDGKEVKTSAQGSGPVDATFKAIEEVVKSNTTVQLYSVNAITSGTDSQGEVTVRLEKAGRIVNGLGSDTDIVIASAKAYINALNLLESKTERAHPQSEGV

SEQ ID NO: 879 - protein, 407 aa, Acidobacteria bacterium Ellin345
MDRSRITIFDTTLRDGEQSPGCSMNPMEKLRMARQLDRLGVDVIEAGFPISSEGDFESVRMIAQEIRRPKIAGLARANAKDIERAWHALEHAARPRIHVFLATSDIHLKYKLRMTREQCIAQAFEQVRFARSLCPDVEFSPEDATRSDLEFLCAVCEAVVEAGATTLNLPDTVGFTVPSDIARMFTAVRNRINRDDIVLSCHCHNDLGLAVANSLAAVEAGARQIECTINGIGERAGNASLEEVTMAIKVRADVFPVETAIHSEHLYPASAMLQEITGADVQANKAIVGRNAFAHEAGIHQDGMLKNPLTYEIMTPRSVGVPDSKLVLGKHSGRSALNHRCEELGYRFTRRDLDNVYRRFVDVADQVKVVEDSHLLRIIREEIARGCMPDMIEPTRAGVASANAAAS

SEQ ID NO: 880 - protein, 389 aa, Arabidopsis thaliana
MVSSSQWDWEHLIMSNPSRTEDDSKQLPTEWEIEKGEGIESIVPHFSGLERVSSGSATSFWHTAVSKSSQSTSINSSSPEAKRCKLASESSPGDSCSNIDFVQVKAPTALEVSVASAESDLCLKLGKRTYSEEYWGRNNNEISAVSMKLLTPSVVAGKSKLCGQSMPVPRCQIDGCELDLSSAKGYHRKHKVCEKHSKCPKVSVSGLERRFCQQCSRFHAVSEFDEKKRSCRKRLSHHNARRRKPQGVFSMNPERVYDRRQHTNMLWNGVSLNARSEEMYEWGNNTYDTKPRQTEKSFTLSFQRGNGSEDQLVASSSRMFSTSQTSGGFPAGKSKFQLHGEDVGEYSGVLHESQDIHRALSLLSTSSDPLAQPHVQPFSLLCSYDVVPK

SEQ ID NO: 881 - protein, 392 aa, Arabidopsis thaliana
MVSSFPWDWENLIMSNQSKTENEKKQQSTEWEFEKGEGIESIVPDFLGFEKVSSGSATSFWHTAVSKSSQSTSINSSSPEDKRCNLASQSSPGDSSSNIDFLQVKPSTALEVPIASAESDLCLKLGKRTYSEEFWGRNNNDLSAVSMNLLTPSVVARKKTKSCGQSMQVPRCQIDGCELDLSSSKDYHRKHRVCETHSKCPKVVVSGLERRFCQQCSRFHAVSEFDEKKRSCRKRLSHHNARRRKPQGVFPLNSERVFDRRQHTSMLWNGLSLNTRSEEKYTWGTTYETKPTQMESGFTLSFQRGNGSEDQLFTGSTLSFSAFQTSGGFSAGKSNIQLPDKGVGECSGGLHESHDFYSALSLLSTTSDSQGIKHTPVAEPPPIFGTFPSHFI

SEQ ID NO: 882 - protein, 507 aa, Arabidopsis lyrata subsp. petraea
MASSLLTSSGMIHTTGSTVVGRSLLPFQSSLHSLSLTHSYKKPAYFISYCSSVSKNGATNATDLKPVVERWPEYIPNKLPDKNYVRVFDTTLRDGEQAPGGSLTPPQKLEIARQLAKLRVDIMEVGFPGSSEEELETVKTIAKTVGNEVDEETGYVPVICAIARSKQRDIEAAWEAVKYAKRPRILIFTSTSDIHMKYKLKKTKEEVIEMAVSSIRLAKSLGFNDIQLGCEDGGRSDKEFLCKILGEAIKAGVTVVNVADTVGINMPHEYGELVTYLKANTPGIDDIVFSVHCHNDLGLATANSIAGIRAGARQVEVTINGIGERSGNASLEEVVMALKCRGAYVINGVYTRIDTRQIMATSKMVQEYTGLYVQPHKPIVGANCFVHESGIHQDGILKNRSTYEILSPEDIGVVKSQNSGLVLGKLSGRHAVKDRLNELGYELDDEKLNDVFSRFRDLTKHKKRITDADMKALVTSSDEISLEKLNSANGLKSNGYVPVPQVSSNML

SEQ ID NO: 883 - protein, 502 aa, Arabidopsis lyrata subsp. petraea
MASFLLTSSSMITTTCPSMVLRSGLSIGSSLPSLRLTRPYNKPTLFTACYSSESKKVASSADLKPAVERRPEYIPNKLPHKNYVRVLDTTLRDGEQSPGAALTPPQKLEIARQLAKLRVDIMEVGFPVSSEEEFEAIKTIAKTVGNEVDEETGYVPVICGIARCKNRDIEAAWEALKYAKRPRVLLFTSTSDIHMKYKLKKTKEEVIEMAVNSIKYAKSLGFTDIECGCEDGGRTEKDFLCKILGEMIKAGATTVGFADTVGINMPPEFGELVAYVKENTPGADDIVLTIHCHNDLGVATANTISGICAGARQVEVTINGIGERSGNAPLEEVVMALKCRGEYLMNGVYTNIDTRQIMATSKMVQEHTGMYVQPHKPIVGDNCFVHESGIHQDGILKNRSTYEILSPEDVGIVKSENSGIVLGKLSGRHAVRDRLKELGYDISDEKFNDIFSRYRELTKEKKRITDADLKALVVNGDEISSDKLNSKGINNLMSSPQISSVV

SEQ ID NO: 884 - protein, 503 aa, Arabidopsis lyrata subsp. petraea
MASLLLTSFGMITTTGPTLVVRSVLPIGSSQPSIRLTRPCNKPTLFMSCCSSESKKVVTSATDLKPIVERWPEYLPNKLPDKNYVRVLDTTLREGEQAPGGSLTPPQKLEIARQLAKLRVDIMEVGFPGSSDEEFETVKTIAKTVGNEVDVETGYVPVISTLARCINRDIEAAWKAVKYAKRPRICIFTSTSDIHMNYKLKKTKEEVIEMSLSSIRFAKSLGFHDIQFGCEDGCRSEKEFVCKILGEAIKAGATSVCIADTVGITMPHEFGELVTYVKANTPGIDDVVFSVHCHNDLGLATANTIAAVCAGVRQFEVTVNGIGERSGNAPLEEVVMALKCRGAYLMDGAYTRIDTRQIMATSKMVQEHTGLYVQPHKPIVGDNCFVHESGIHQDGILKNRSTYEILSPEDVGIVKSQISGIVLGKLSGRHAVKGRLKELGYEINDEKFNEIFSRFRDLTKQKKRITDADLKALVVNGDKITSEKSSSKGNNNLMSSPHISSVV

SEQ ID NO: 885 - protein, 507 aa, Arabidopsis cebennensis
MASSLLTSSGMIHTTGSTVVGRSVLPFQSSLHSLPLTHLYKKPAYFISCCSSVSKIGATNATDLKPVVERWPEYIPNKLPDNNYVRVFDTTLRDGEQAPGGSLTPPQKLEIARQLAKLRVDIMEVGFPGSSEEELETVKTIAKTVGNEVDEDTGYVPVICAIARSKHRDIEAAWEAVKYAKRPRILIFTSTSDIHMKYKLKKTKEEVIEMAVSSIRLAKSLGFNDIQLGCEDAGRSDKEFLCKILGEAIKAGVMVVNVADTVGINMPHEYGELVTYLKANTPGIDDIVFSVHCHNDLGLATANSIAGIRAGARQVEVTINGIGERSGNASLEEVVMALKCRGAYVINGVYTRIDTRQIMATSKMVQEYTGLYVQPHKPIVGANCFVHESGIHQDGILKNRSTYEILSPDDIGIVKSQNSGLVLGKLSGRHAVKDRLNELGYELDDEKLNDVFSRFRDLTKHKKRITDADMKALVTSSDEISLEKLNGANSIKSNVYVPVPQVSSNML

SEQ ID NO: 886 - protein, 502 aa, Arabidopsis cebennensis
MASFLLTSSSMITTTCPSMVLRSGLPIGSSLPSLRLTRPYNKATLFTACYSSESKKVASSADLKPAVERRPEYIPNKLPHKNYVRVLDTTLRDGEQSPGAALTPPQKLEIARQLAKLRVDIMEVGFPVSSEEEFEAIKTIAKTVGNEVDEETGYVPVICGIARCKNRDIEAAWEALKYAKRPRVILFTSTSDIHMKYKLKKTKEEVIEMAVNSVKYAKSLGFKDIEFGCEDGGRTEKDFLCKILGESIKAGATTVGFADTVGINMPPEFGELVAYVKENTPGADDIVFTIHCHNDLGVATANTISGICAGARQVEVTINGIGERSGNAPLEEVVMALKCRGEYLMDGVYTKIDTRQIMATSKMVQEHTGMYVQPHKPIVGDNCFVHESGIHQDGILKNRSTYEILSPEDVGIVKSENSGIIFGKLSGRHAVKDRLKELGYEISDEKFNDIFSRYRELTKEKKRITDDDLKALVVNGDEISSDKLNSKGINNLTSSPQISAVV

SEQ ID NO: 887 - protein, 504 aa, Arabidopsis cebennensis
MALSLLTSSGMIHTTGSTVVGRSVLPFQSSLHSLPLTHLYKKPAYFISCCSSETKKVVTSATDLKPIVERWPEYKPNKLPDKNYVRVLDTTLREGEQAPGGSLTPPQKLEIARQLAKLRVDIMEVGFPGSSEEEFETVKTIAKTVGNEVDVETGYVPVISTLARCINRDIEAAWKAVKYAKRPRICIFTSISDIHMNYKLKKTKEEVIEMSLSSIRFAKSLGFHDIQIGCEDGCRAEKEFVCKILGEAIKAGATSVCIADTVGITMPHEFGELVTYVKANTPGIDDVVFSVHCHNDLGLATANTIAAVCAGVRQFEVTVNGIGERSGNAPLEEVVMALKCRGAYLMDGAYTRIDTRQIMATSKMVQEHTGLYVQPHKPIVGDNCFVHESGIHQDGILKNRSTYEILSPEDVGIVKSQNSGIVLGKLSGRHAVKGRLKELGYEINDEKFNEIFSRFRDLTKQKKRITDADLKALMVNGDKITSEKSSSKGINNNLMSSPHISSVV

SEQ ID NO: 888 - protein, 504 aa, Boechera divaricarpa
MASSLLTSSGISPTTGSTVVVGSVLPFRTSMLSLRLTRPYKKPALFISCCSSESRKTATNATDLKPVVERWPEYIPNKLPDKNYVRVFDTTLRDGEQAPGGSLTPPQKLEIARQLAKLRVDIMEVGFPGSSEEELETVKTIAKTVGNEVDEETGYVPAICAIARSKHSDIEAAWEAVKYAKRPRILIFTSTSDIHMKYKLKKTKEEVIEMAASSVRFAKSLGFNDIQFGCEDGGRSDKEFLCKILGESIKAGATVVNVADTVGINMPHEYGELVTYVKANTPGIDDIVFSVHCHNDLGLATANSIAGIRAGARQVEVTINGIGERSGNASLEEVVMALKCRGAYVLDGVYTGIDTREIMATSKMVQEYTGLYVQPHKPIVGANCFVHESGIHQDGILKNRSTYEILSPEDVGVVKSQNSGIVLGKLSGRHAMKGRLKELGYELDDEKLNDVFSRFRDLTKHKKRITDADLKALVTSSDEISFEKLNRANGKMSNGYIPVPQVSL

SEQ ID NO: 889 - protein, 503 aa, Boechera divaricarpa
MASLLHTSSSMITTISPTMVARSVLPIGSSLPSIRLTRPFNKPTLFISCSSSESKKAATSGTDLKPIVERWPEYIPNKLPHKNYVRILDTTLRDGEQSPGAALTPPQKLEIARQLAKLRVDIMEVGFPVSSEEEFEAIKTIAKTVGNEVDEETGYVPVICAIARCKQSDIEAVWEALKYAKKQRVIIFTSTSDIHMKYKLKKTQEEVIEMAVSSIKYAKSLGFTDIQLGCEDGGRSEKEFLCKILGESIKAGATTVGFADTVGINMPQEFGELMAYVKENTPGFNDIVFAIHCHNDLGVATANTIAGICAGARQVEVTINGIGERSGNAPLEEVVMALKCRGEYLMDGVYTKIDTRQIMATSKMVQEHTGMYVQPHKPIVGDNCFVHESGIHQDGILKNRSTYEILSPEDVGIVKSQNSGIVLGKLSGRHAVKERLKELGYEINDENFNDIFSRFRDLTKHKKRITDADLKALVVSGDEISLEKLNSKGINKLMSSPQIPSVV

SEQ ID NO: 890 - protein, 481 aa, Boechera divaricarpa
MASVLLTSSGMITTTGPTVVVRSVLPIKSSLPSIHLTRPCNKPTLFISCCSSESKKAATSATDLKPIVERWPEYIPNKLPDKNYVRVLDTTLREGEQAPGGSLTPPQKLEIARQLAKLRVDIMEVGFPGSSEEEFETVKVIAKTVGNEVDVETGYVPVISTLARSKNRDIEAAWKAVKYAKRPRICIFTSTSDIHMKYKLKKTQEEVIEMSLSGIRFAKSLGFHDIQFGCEDGCRSEKDFVCKILGEAIKAGATSVCIADTVGITMPQEFGELVTYVKANTPGINDVVFSVHCHNDLGLATANTIAAVCAGVRQFEVTINGIGERSGNAPLEEVVMALKCRGEYLMDGVYTRIDTRQIMATSKMVQEYTGLYVQPHKPIVGDNCFVHESGIHQDGILKNRSTYEILSPEDVGIVKSQNSGIVLGKLSGRHAVKERLKELGYEINDEKLKDIFSQFRDLTKQKKRIADADLKALVVNGVERN

SEQ ID NO: 891 - protein, 507 aa, Arabidopsis lyrata subsp. lyrata
MASSLLTSSGMIHTTGSTVVGRSLLPFQSSLHSLSLTHSYKKPAYFISCCSSVSKNGATNATDLKPVVDRWPEYIPNKLPDKNYVRVFDTTLRDGEQAPGGSLTPPQKLEIARQLAKLRVDIMEVGFPGSSEEELETVKTIAKTVGNEVDEETGYVPVICAIARSKHRDIEAAWEAVKYAKRPRILIFTSTSDIHMKYKLKKTKEEVIEMAVSSIRLAKSLGFNDIQLGCEDGGRSDKEFLCKILGEAIKAGVTVVNVADTVGINMPHEYGELVTYLKANTPGIDDIVFSVHCHNDLGLATANSIAGIRAGARQVEVTINGIGERSGNASLEEVVMALKCRGAYVINGVYTRIDTRQIMATSKMVQEYTGLYVQPHKPIVGTNCFVHESGIHQDGILKNRSTYEILSPEDIGVVKSQNSGLVLGKLSGRHAVKDRLNELGYELDDEKLNDVFSRFRDLTKHKKRITDADMKALVTSSDEISLEKLNSANGLKSNGYVPVPQVSSNML

SEQ ID NO: 892 - protein, 502 aa, Arabidopsis lyrata subsp. lyrata
MASFLLTSSSMITTTCPSMVLRSGLSIGSSLPSLRLTRPYNKPTLFTACYSSESKKVASSADLKPAVERRPEYIPNKLPHKNYVRVLDTTLRDGEQSPGAALIPPQKLEIARQLAKLRVDIMEVGFPVSSEEEFEAIKTIAKTVGNEVDEETGYVPVICGIARCKNRDIEAAWEALKYAKRPRVLLFTSTSDIHMKYKLKKTKEEVIEMAVNSIKYAKSLGFTDIECGCEDGGRTEKDFLCKILGEMIKAGATTVGFADTVGINMPPEFGELVAYVKENTPGADDIVLAIHCHNDLGVATANTISGICAGARQVEVTINGIGERSGNAPLEEVVMALKCRGEYLMNGVYTNIDTRQIMATSKMVQEHTGMYVQPHKPIVGDNCFVHESGIHQDGILKNRSTYEILSPEDVGIVKSENSGIVLGKLSGRHAVRDRLKELGYDISDEKFNDIFSRYRELTKEKKRITDADLKALVVNGDEISSDKLNSKGINNLMSSPQISSVV

SEQ ID NO: 893 - protein, 503 aa, Arabidopsis lyrata subsp. lyrata
MASLLLTSFGMITTTGPTLVVRSVLPIGSSQPSIRLTRPCNKPTLFMSCCSSESKKVVTSATDLKPIVERWPEYLPNKLPDKNYVRVLDTTLREGEQAPGGSLTPPQKLEIARQLAKLRVDIMEVGFPGSSDEEFETVKTIAKTVGNEVDVETGYVPVISTLARCINRDIEAAWKAVKYAKRPRICIFTSTSDIHMNYKLKKTKEEVIEMSLSSIRFAKSLGFHDIQFGCEDGCRSEKEFVCKILGEAIKAGATSVCIADTVGITMPHEFGELVTYVKANTPGIDDVVFSVHCHNDLGLATANTIAAVCAGVRQFEVTVNGIGERSGNAPLEEVVMALKCRGAYLMDGAYTRIDTRQIMATSKMVQEHTGLYVQPHKPIVGDNCFVHESGIHQDGILKNRSTYEILSPEDVGIVKSQNSGIVLGKLSCSHAVKGRLKELGYEINDEKFNEIFSRFRDLTKLKKRITDADLKALVVNGDKITSEKSSSKGNNNLMSSPHISSVV

SEQ ID NO: 894 - protein, 527 aa, Silicibacter sp. TM1040
MTSKTDTVNQQDRVLIFDTTLRDGEQSPGATMTHDEKLEIAELLDDMGVDIIEAGFPIASEGDFKAVSEIAERSKNSVICGLARANFKDIDRCAEAVRKAAKPRIHTFIGTSPLHRAIPNLTMDEMAERIHDTVTHARNLVDNVQWSPMDATRTEWDYLCRVIEIAIKAGATTINIPDTVGYTAPRESADLIRRLIETVPGADEIIFATHCHNDLGMATANSLAAVEAGARQIECTINGLGERAGNTALEEVVMAMRVRNDIMPFQTGIDTKKIMHISRRVATVSGFNVQFNKAIVGKNAFAHESGIHQDGMLKNKETFEIMRPEDVGLAGTSLPLGKHSGRAALRDKLSSLGFEIGDNQLKDVFVRFKELADRKKEVFDDDIIALMRTSGDEDDHLKLVSMKVVCGTGGPAESTVEMEVDGKDVTETAEGDGPVDATFKAIRKIHPNAAHLQLYQVHAVTEGTDAQATVSVRLEEDGVIATGDSANTDTVVASAMAYIDALNRLIVRRDKMGEGADSREISYKDVD

SEQ ID NO: 895 - RNA, 20 nt, Allium cepa
cgggacugaagggaguccuu

SEQ ID NO: 896 - RNA, 19 nt, Arabidopsis thaliana
guggacugaacggagcucu

SEQ ID NO: 897 - RNA, 21 nt, Arabidopsis thaliana
cuuggacucaacggaucuccc

SEQ ID NO: 898 - RNA, 21 nt, Brassica napus
cuuggacugaagggagcuccc

SEQ ID NO: 899 - RNA, 21 nt, Brassica napus
uuuggacugaagggagcuccu

SEQ ID NO: 900 - RNA, 20 nt, Citrus clementina
uuugacugcaaggagcuccu

SEQ ID NO: 901 - RNA, 20 nt, Citrus clementina
uucgacugcaaggagcuccu

SEQ ID NO: 902 - RNA, 20 nt, Glycine max
uuggacugaagggagcuccc

SEQ ID NO: 903 - RNA, 20 nt, Glycine max
uuggacugaagggagcuccu

SEQ ID NO: 904 - RNA, 19 nt, Gossypium
ugggacugaagggagcucc

SEQ ID NO: 905 - RNA, 20 nt, Helianthus annuus
uuggucuaaagggugcuucc

SEQ ID NO: 906 - RNA, 21 nt, Ipomoea nil
cuuggacugaagggagcuccc

SEQ ID NO: 907 - RNA, 21 nt, Nicotiana tabacum
uuggacugaagggagcuccuu

SEQ ID NO: 908 - RNA, 20 nt, Nicotiana tabacum
cuggacugaagucagcuccc

SEQ ID NO: 909 - RNA, 20 nt, Nicotiana tabacum
uugggcagaagggagcuucc

SEQ ID NO: 910 - RNA, 20 nt, Physcomitrella patens
cuuggacugaagggagcucc

SEQ ID NO: 911 - RNA, 20 nt, Picea
uuggacugaagggagcgccc

SEQ ID NO: 912 - RNA, 21 nt, Populus
cuuggacugaagggagcuccc

SEQ ID NO: 913 - RNA, 21 nt, Populus
uuggacugaagggagcuccuu

SEQ ID NO: 914 - RNA, 21 nt, Secale cereale
cucggaccugcagggagcucc

SEQ ID NO: 915 - RNA, 21 nt, Triticum aestivum
cuuggacugaagggagcuccc

SEQ ID NO: 916 - RNA, 20 nt, Vitis vinifera
ugcugccaacucaugcaugg

SEQ ID NO: 917 - RNA, 21 nt, Vitis vinifera
agccaaagaagaguugcccag

SEQ ID NO: 918 - RNA, 21 nt, Vitis vinifera
acagccgaaaacaauuggagc

SEQ ID NO: 919 - RNA, 20 nt, Vitis vinifera
cuuggacugaaggaagcuag

SEQ ID NO: 920 - RNA, 21 nt, Vitis vinifera
uuuggacugaagggagcuccu

SEQ ID NO: 921 - RNA, 20 nt, Zea mays
uuggacugaagggugcuccc

SEQ ID NO: 922 - RNA, 20 nt, Zea mays
uuggacugaaggcugcugcc

SEQ ID NO: 923 - RNA, 20 nt, Aquilegia
ugauugugccgagccaagau

SEQ ID NO: 924 - RNA, 20 nt, Beta vulgaris
cgagccgaauccaaaucacc

SEQ ID NO: 925 - RNA, 21 nt, Beta vulgaris
uuagccuugucaauaucacga

SEQ ID NO: 926 - RNA, 21 nt, Brassica napus
uugagccgugccaauaucacg

SEQ ID NO: 927 - RNA, 23 nt, Citrus sinensis
uugagccgucccgccaauaucac

SEQ ID NO: 928 - RNA, 20 nt, Festuca arundinacea
ugauugagccgagccagaau

SEQ ID NO: 929 - RNA, 21 nt, Glycine max
uugagccgcgucaauaucuca

SEQ ID NO: 930 - RNA, 21 nt, Glycine max
uugagccgcgucaauaucuua

SEQ ID NO: 931 - RNA, 21 nt, Glycine max
uugagccgcgccaauaucacu

SEQ ID NO: 932 - RNA, 21 nt, Gossypium
agauugagccgcgccaauauc

SEQ ID NO: 933 - RNA, 21 nt, Gossypium
cgagccgaaucaauaucacuc

SEQ ID NO: 934 - RNA, 21 nt, Hordeum vulgare
ugauugagccgugccaauauc

SEQ ID NO: 935 - RNA, 21 nt, Lactuca serriola
ugauagggaugaguccauauc

SEQ ID NO: 936 - RNA, 20 nt, Lactuca serriola
uaagccaaucaauaucacuc

SEQ ID NO: 937 - RNA, 21 nt, Lotus japonicus
augagccggaucaauaucacu

SEQ ID NO: 938 - RNA, 21 nt, Nicotiana tabacum
agauugagccgcgccaauauc

SEQ ID NO: 939 - RNA, 21 nt, Oryza sativa
ugauugagccgugccaauauc

SEQ ID NO: 940 - RNA, 21 nt, Oryza sativa
ggauugagccgcgucaauauc

SEQ ID NO: 941 - RNA, 21 nt, Oryza sativa
uugagccgugccaauaucaca

SEQ ID NO: 942 - RNA, 20 nt, Phaseolus vulgaris
cgagcagaaucaauauuucu

SEQ ID NO: 943 - RNA, 21 nt, Physcomitrella patens
ugauuuaccugugccaauauc

SEQ ID NO: 944 - RNA, 21 nt, Physcomitrella patens
ugagcgccaccaauaucacau

SEQ ID NO: 945 - RNA, 21 nt, Physcomitrella patens
agauugagccgcgccaauauc

SEQ ID NO: 946 - RNA, 21 nt, Physcomitrella patens
uugaauggcgccaacaucaug

SEQ ID NO: 947 - RNA, 21 nt, Physcomitrella patens
gcauugagccgcaccaauaca

SEQ ID NO: 948 - RNA, 21 nt, Physcomitrella patens
uugagccgccacaacaucaca

SEQ ID NO: 949 - RNA, 21 nt, Picea
ugauugagucuuuccaaucuc

SEQ ID NO: 950 - RNA, 23 nt, Populus
uugagccgucuagccaauaucac

SEQ ID NO: 951 - RNA, 21 nt, Populus
cgagccgaaucaauaucacuc

SEQ ID NO: 952 - RNA, 21 nt, Prunus persica
uugagcagugcuaaugucaca

SEQ ID NO: 953 - RNA, 21 nt, Saccharum officinarum
cgaucgagucgugacaauauc

SEQ ID NO: 954 - RNA, 21 nt, Solanum tuberosum
uugagccgcgcccaaaucccu

SEQ ID NO: 955 - RNA, 21 nt, Solanum tuberosum
uucagcuguaccaauaucacc

SEQ ID NO: 956 - RNA, 21 nt, Triphysaria
ugauugagccgugccaauauc

SEQ ID NO: 957 - RNA, 21 nt, Triticum aestivum
uugagccgugccaauaucacg

SEQ ID NO: 958 - RNA, 21 nt, Vitis vinifera
ugauugagccgcgucaauauc

SEQ ID NO: 959 - RNA, 21 nt, Zea mays
uugagccgugccaauaucaca

SEQ ID NO: 960 - RNA, 21 nt, Zea mays
uugagccgugccaauaucacg

SEQ ID NO: 961 - RNA, 21 nt, Allium cepa
uguugucucaaacuugcugcc

SEQ ID NO: 962 - RNA, 21 nt, Allium cepa
uuuugucucacucuugcugcc

SEQ ID NO: 963 - RNA, 21 nt, Coffea canephora
uugugguuuucuugcgagaug

SEQ ID NO: 964 - RNA, 21 nt, Coffea canephora
uugcuggcucuagcuugcugc

SEQ ID NO: 965 - RNA, 21 nt, Festuca arundinacea
ugcaguaguugagucaagcuu

SEQ ID NO: 966 - RNA, 21 nt, Gossypium
ugcaguugcugccacaaccuu

SEQ ID NO: 967 - RNA, 21 nt, Gossypium raimondii
ugcaguugcugccacaaccuu

SEQ ID NO: 968 - RNA, 21 nt, Helianthus annuus
uggagugauugucucaagcuu

SEQ ID NO: 969 - RNA, 21 nt, Hordeum vulgare
cgcaguuguucgcucaagcuu

SEQ ID NO: 970 - RNA, 21 nt, Hordeum vulgare
ugcaguugcugucucaagcuu

SEQ ID NO: 971 - RNA, 21 nt, Hordeum vulgare
ugcaguugcugccucaagcuu

SEQ ID NO: 972 - RNA, 21 nt, Lactuca serriola
uucaguugcugugucaagcuu

SEQ ID NO: 973 - RNA, 21 nt, Oryza sativa
ugcaguugcugccucaagcuu

SEQ ID NO: 974 - RNA, 21 nt, Oryza sativa
uucaguuguugccucaagcac

SEQ ID NO: 975 - RNA, 21 nt, Saccharum officinarum
uuguggcuuucuugcaaguug

SEQ ID NO: 976 - RNA, 21 nt, Saccharum officinarum
ugcaguugcugccucuagcuu

SEQ ID NO: 977 - RNA, 21 nt, Saccharum officinarum
ucgcuuggugcagaucgggac

SEQ ID NO: 978 - RNA, 23 nt, Saccharum officinarum
uggaguggaguggaguggagagu

SEQ ID NO: 979 - RNA, 21 nt, Saccharum officinarum
ugcaguugcugccucuagcuu

SEQ ID NO: 980 - RNA, 21 nt, Saccharum officinarum
uugugguuuucuugcaaguug

SEQ ID NO: 981 - RNA, 21 nt, Saccharum officinarum
ugcaguuguugucucaagcuu

SEQ ID NO: 982 - RNA, 21 nt, Saccharum officinarum
ugcaguuguugccucaagcuu

SEQ ID NO: 983 - RNA, 21 nt, Sorghum bicolor
uuguggcuuucuugcaaguug

SEQ ID NO: 984 - RNA, 21 nt, Sorghum bicolor
ugcaguuccugccucaugcuu

SEQ ID NO: 985 - RNA, 21 nt, Sorghum bicolor
ugcaguuguugucucaagcuu

SEQ ID NO: 986 - RNA, 21 nt, Sorghum bicolor
ugcaguuguugccucaagcuu

SEQ ID NO: 987 - RNA, 21 nt, Triticum aestivum
ugcaguugcugucucaagcuu

SEQ ID NO: 988 - RNA, 21 nt, Triticum aestivum
ugcaguuccugccucaugcuu

SEQ ID NO: 989 - RNA, 21 nt, Zea mays
uuguggcuuucuugcaaguug

SEQ ID NO: 990 - RNA, 21 nt, Zea mays
auauuuugggacggagggagu

SEQ ID NO: 991 - RNA, 21 nt, Zea mays
uugcugccucuagcuugcugc

SEQ ID NO: 992 - RNA, 21 nt, Zea mays
ugcaguugcugccucaagcuu

SEQ ID NO: 993 - RNA, 21 nt, Zea mays
ugcaguuguugucucaagcuu

SEQ ID NO: 994 - RNA, 21 nt, Glycine max
uccaaagggaucgcauugauc

SEQ ID NO: 995 - RNA, 21 nt, Gossypium
uccaaagggaucgcauugauc

SEQ ID NO: 996 - RNA, 21 nt, Malus_x domestica
uccaaagggaucgcauugauc

SEQ ID NO: 997 - RNA, 21 nt, Nicotiana tabacum
uccaaagggaucgcauugauc

SEQ ID NO: 998 - RNA, 21 nt, Oryza sativa
uccaaagggaucgcauugauc

SEQ ID NO: 999 - RNA, 21 nt, Populus
uccaaagggaucgcauugauc

SEQ ID NO: 1000 - RNA, 21 nt, Solanum tuberosum
uccaaagggaucgcauugucu

SEQ ID NO: 1001 - RNA, 22 nt, Sorghum bicolor
uccagaagggauggcauugauu

SEQ ID NO: 1002 - RNA, 21 nt, Zea mays
uccaaagggaucgcauugugu

SEQ ID NO: 1003 - RNA, 21 nt, Beta vulgaris
uguguuccaagaucaacccau

SEQ ID NO: 1004 - RNA, 21 nt, Brassica napus
uguguucucaggucaccccug

SEQ ID NO: 1005 - RNA, 21 nt, Citrus clementina
uguguucucaggucaccccuu

SEQ ID NO: 1006 - RNA, 21 nt, Glycine max
uguguucucaggucgccccug

SEQ ID NO: 1007 - RNA, 21 nt, Glycine max
uguguucucaggucaccccuu

SEQ ID NO: 1008 - RNA, 21 nt, Gossypium
uguguucucaggucaccccuu

SEQ ID NO: 1009 - RNA, 21 nt, Gossypium raimondii
uguguucucaggucaccccuu

SEQ ID NO: 1010 - RNA, 21 nt, Helianthus annuus
cguguucucaggucgccccug

SEQ ID NO: 1011 - RNA, 21 nt, Lactuca sativa
uguguucucaggucaccccuu

SEQ ID NO: 1012 - RNA, 21 nt, Lactuca serriola
uguguucucaggucgccccug

SEQ ID NO: 1013 - RNA, 21 nt, Lactuca serriola
uguguucucaggucaccccuu

SEQ ID NO: 1014 - RNA, 21 nt, Lotus japonicus
uguguucucaggucaccccuu

SEQ ID NO: 1015 - RNA, 21 nt, Lotus japonicus
uguguucucacgucgccccug

SEQ ID NO: 1016 - RNA, 21 nt, Malus_x domestica
uguguucucaggucgccccug

SEQ ID NO: 1017 - RNA, 21 nt, Medicago truncatula
uguguucucaggucgccccug

SEQ ID NO: 1018 - RNA, 21 nt, Medicago truncatula
uguguucucaggucaccccuu

SEQ ID NO: 1019 - RNA, 21 nt, Nicotiana benthamiana
uguguucucaggucgccccug

SEQ ID NO: 1020 - RNA, 22 nt, Oryza sativa
uguguucuacaggucgccccug

SEQ ID NO: 1021 - RNA, 21 nt, Picea
uguguucgaaggucaccccag

SEQ ID NO: 1022 - RNA, 21 nt, Picea
cguguucucaggucaccccug

SEQ ID NO: 1023 - RNA, 21 nt, Picea
uguguuccaaggucaucccag

SEQ ID NO: 1024 - RNA, 21 nt, Picea
uggauuccaaggucaccacag

SEQ ID NO: 1025 - RNA, 20 nt, Picea
uguguucucagucaccccuu

SEQ ID NO: 1026 - RNA, 21 nt, Pinus
ugugugccaaggucaccccag

SEQ ID NO: 1027 - RNA, 21 nt, Populus
ugugaucucagagcaccccuu

SEQ ID NO: 1028 - RNA, 21 nt, Populus
ugccaagggagaauugcccug

SEQ ID NO: 1029 - RNA, 23 nt, Populus
uugagccgucuagccaauaucac

SEQ ID NO: 1030 - RNA, 21 nt, Populus
uguguucucaggucgccccug

SEQ ID NO: 1031 - RNA, 21 nt, Populus
aguguucucagguggccccag

SEQ ID NO: 1032 - RNA, 21 nt, Triticum aestivum
uguguucucaggucgcccccg

SEQ ID NO: 1033 - RNA, 24 nt, Triticum aestivum
uagucccgguucgugccacgaacc

SEQ ID NO: 1034 - RNA, 24 nt, Triticum aestivum
ccgcgacaaguaauuccggacgga

SEQ ID NO: 1035 - RNA, 24 nt, Triticum aestivum
uugucgcacguauggauguaucua

SEQ ID NO: 1036 - RNA, 21 nt, Zea mays
uguguucucaggucgcccccg

SEQ ID NO: 1037 - RNA, 21 nt, Allium cepa
ugcauugccucuuuccuagcu

SEQ ID NO: 1038 - RNA, 21 nt, Brassica napus
augcacugccucuucccuggc

SEQ ID NO: 1039 - RNA, 21 nt, Brassica napus
augcgcugacucuuccauggc

SEQ ID NO: 1040 - RNA, 21 nt, Brassica napus
acgcacugacucaucccuggc

SEQ ID NO: 1041 - RNA, 21 nt, Euphorbia esula
augcacugccucuucccuggc

SEQ ID NO: 1042 - RNA, 21 nt, Glycine max
augcacugccucuucccuggc

SEQ ID NO: 1043 - RNA, 21 nt, Helianthus annuus
ugcacugccucauuccugacu

SEQ ID NO: 1044 - RNA, 21 nt, Lotus japonicus
augcacugccucuucccuggc

SEQ ID NO: 1045 - RNA, 21 nt, Pinus
augcacugccucuucccuggc

SEQ ID NO: 1046 - RNA, 21 nt, Populus
augcacugccucuucccuggc

SEQ ID NO: 1047 - RNA, 21 nt, Saccharum officinarum
cugcacuggcucuacccuggc

SEQ ID NO: 1048 - RNA, 21 nt, Sorghum bicolor
cugcacugccucuucccuggc

SEQ ID NO: 1049 - RNA, 21 nt, Zea mays
cugcacugccucuucccuggc

SEQ ID NO: 1050 - RNA, 21 nt, Brassica napus
gggaaggggaaagcagaggag

SEQ ID NO: 1051 - RNA, 21 nt, Oryza sativa
uggaaggggcaugcagaggag

SEQ ID NO: 1052 - RNA, 21 nt, Sorghum bicolor
uggaaggggcaugcagaggag

SEQ ID NO: 1053 - RNA, 21 nt, Sorghum bicolor
uggaaggggcaugcaaaggag

SEQ ID NO: 1054 - RNA, 21 nt, Zea mays
uggaaggggcaugcagaggag

SEQ ID NO: 1055 - RNA, 21 nt, Aquilegia
uagacauggaugaaugaccug

SEQ ID NO: 1056 - RNA, 21 nt, Brassica napus
uagccaaagacgucuugucca

SEQ ID NO: 1057 - RNA, 21 nt, Citrus sinensis
gagccaaggaugacuucccaa

SEQ ID NO: 1058 - RNA, 21 nt, Euphorbia esula
aagccaaggaugacuugccug

SEQ ID NO: 1059 - RNA, 21 nt, Euphorbia esula
uagccaaggaugacuugcccg

SEQ ID NO: 1060 - RNA, 21 nt, Euphorbia esula
ugagccaaggaugacuugccg

SEQ ID NO: 1061 - RNA, 21 nt, Festuca arundinacea
uagccaaggaugacuugccua

SEQ ID NO: 1062 - RNA, 21 nt, Glycine max
cagccaaggaugacuugccga

SEQ ID NO: 1063 - RNA, 21 nt, Glycine max
cagccaagggugauuugccgg

SEQ ID NO: 1064 - RNA, 21 nt, Glycine max
uagccaaggaugacuugccua

SEQ ID NO: 1065 - RNA, 21 nt, Glycine max
cagccaaggaugacuugccgg

SEQ ID NO: 1066 - RNA, 21 nt, Glycine max
ugagccaaggaugacuugccg

SEQ ID NO: 1067 - RNA, 21 nt, Glycine max
cagccaagaaugacuugccgg

SEQ ID NO: 1068 - RNA, 21 nt, Glycine max
aagccaaggaugacuugccga

SEQ ID NO: 1069 - RNA, 21 nt, Glycine max
aagccaaggaugacuugccgg

SEQ ID NO: 1070 - RNA, 21 nt, Glycine max
uagccaagaaugacuugccgg

SEQ ID NO: 1071 - RNA, 19 nt, Glycine max
cagccaaggaugacgccgu

SEQ ID NO: 1072 - RNA, 21 nt, Gossypium raimondii
uggccaaguaugacuuaccgg

SEQ ID NO: 1073 - RNA, 21 nt, Helianthus annuus
uagcacagauugacuugccua

SEQ ID NO: 1074 - RNA, 21 nt, Helianthus annuus
gagccaagaaugauuugcugc

SEQ ID NO: 1075 - RNA, 21 nt, Hordeum vulgare
aagccaaggaugauuugccag

SEQ ID NO: 1076 - RNA, 21 nt, Ipomoea nil
uagccaaugaugaauugaugg

SEQ ID NO: 1077 - RNA, 21 nt, Ipomoea nil
gugaagugcuuggagcaacuc

SEQ ID NO: 1078 - RNA, 21 nt, Ipomoea nil
uugacagaagauagagagcac

SEQ ID NO: 1079 - RNA, 21 nt, Ipomoea nil
aagccaagaaugaauugccag

SEQ ID NO: 1080 - RNA, 21 nt, Ipomoea nil
gcgucaagauugacuugucgg

SEQ ID NO: 1081 - RNA, 21 nt, Ipomoea nil
cagccaaggaugacuugccgg

SEQ ID NO: 1082 - RNA, 21 nt, Lactuca sativa
gagccacugauaacuggccgu

SEQ ID NO: 1083 - RNA, 21 nt, Lactuca sativa
uagccaaggaugacuugccug

SEQ ID NO: 1084 - RNA, 21 nt, Lactuca serriola
uagccaaggaugacuugccug

SEQ ID NO: 1085 - RNA, 21 nt, Lotus japonicus
caugcacgaaugauuugccgg

SEQ ID NO: 1086 - RNA, 21 nt, Medicago truncatula
aagccaagaaugaguugccug

SEQ ID NO: 1087 - RNA, 21 nt, Mesembryanthemum crystallinum
ucgccaagaggacugcccaug

SEQ ID NO: 1088 - RNA, 21 nt, Nicotiana benthamiana
cagccagggaugacuugccga

SEQ ID NO: 1089 - RNA, 21 nt, Nicotiana tabacum
aagccaaggaugaacugccac

SEQ ID NO: 1090 - RNA, 21 nt, Oryza sativa
uagccaaggaugacuugccug

SEQ ID NO: 1091 - RNA, 21 nt, Oryza sativa
uagccaagaauggcuugccua

SEQ ID NO: 1092 - RNA, 21 nt, Oryza sativa
uagccaaggagacugccugug

SEQ ID NO: 1093 - RNA, 21 nt, Oryza sativa
cagccaaggaugacuugccga

SEQ ID NO: 1094 - RNA, 21 nt, Picea
ucagccaaggaugacuugccu

SEQ ID NO: 1095 - RNA, 21 nt, Picea
cagccaaggaugacuugccaa

SEQ ID NO: 1096 - RNA, 21 nt, Picea
gagccaaggaugacuugccag

SEQ ID NO: 1097 - RNA, 21 nt, Picea
cagccaagaaugacuugcccg

SEQ ID NO: 1098 - RNA, 21 nt, Populus
uagccaaggacgacuuguccg

SEQ ID NO: 1099 - RNA, 21 nt, Populus
cagccaaggaugauuugccga

SEQ ID NO: 1100 - RNA, 21 nt, Populus
uagccaaggaugacuugccug

SEQ ID NO: 1101 - RNA, 22 nt, Populus
uagccaaggacagacuuguccg

SEQ ID NO: 1102 - RNA, 21 nt, Populus
cagccaaggaugacuugccga

SEQ ID NO: 1103 - RNA, 21 nt, Populus
uagccaaggaugagucgcucg

SEQ ID NO: 1104 - RNA, 21 nt, Populus
gagccaaggagagugccaaug

SEQ ID NO: 1105 - RNA, 21 nt, Prunus persica
gagccaagaaugacuugcugc

SEQ ID NO: 1106 - RNA, 21 nt, Solanum lycopersicum
aagccaagaaugaauugccgc

SEQ ID NO: 1107 - RNA, 21 nt, Sorghum bicolor
uagccaaggaugacuugccua

SEQ ID NO: 1108 - RNA, 21 nt, Sorghum bicolor
uagccaaggaugacuugccug

SEQ ID NO: 1109 - RNA, 21 nt, Triticum aestivum
uagccaaggaugauuugccug

SEQ ID NO: 1110 - RNA, 21 nt, Triticum aestivum
aagccaaggaugaauugccac

SEQ ID NO: 1111 - RNA, 21 nt, Triticum aestivum
uagccaaggcugcauugccga

SEQ ID NO: 1112 - RNA, 21 nt, Triticum aestivum
aagccaaggaugauuugccag

SEQ ID NO: 1113 - RNA, 22 nt, Vitis vinifera
uggccauggacaaucuugccgg

SEQ ID NO: 1114 - RNA, 21 nt, Vitis vinifera
ugauugagccgcgucaauauc

SEQ ID NO: 1115 - RNA, 21 nt, Vitis vinifera
agagccgaggauggcuugcug

SEQ ID NO: 1116 - RNA, 21 nt, Zea mays
uagccaagcaugauuugcccg

SEQ ID NO: 1117 - RNA, 21 nt, Zea mays
uagccaaggaugacuugccug

SEQ ID NO: 1118 - RNA, 21 nt, Zea mays
cagccaaggaugacuugccgg

SEQ ID NO: 1119 - RNA, 21 nt, Zea mays
uagccaagaauggcuugccua

SEQ ID NO: 1120 - RNA, 20 nt, Citrus clementina
cuugagugcagcgauguuga

SEQ ID NO: 1121 - RNA, 21 nt, Glycine max
ucauugaguguagcauugaug

SEQ ID NO: 1122 - RNA, 21 nt, Glycine max
ucauugagugcagcguugaug

SEQ ID NO: 1123 - RNA, 20 nt, Nicotiana benthamiana
agugagugcagcuuggauga

SEQ ID NO: 1124 - RNA, 20 nt, Prunus persica
auugaguccaguguugguga

SEQ ID NO: 1125 - RNA, 20 nt, Solanum lycopersicum
auucagugcagaguugaugc

SEQ ID NO: 1126 - RNA, 20 nt, Solanum lycopersicum
uucaccuuccaucaacguuc

SEQ ID NO: 1127 - protein, 1018 aa, Artificial sequence
  consensus of seq id: 16 and its homologs
  misc_feature (1)..(1): Absent or Met
  misc_feature (2)..(2): Absent or Gly
  misc_feature (3)..(3): Absent or Asn
  misc_feature (4)..(4): Absent or Val or Ala
  misc_feature (5)..(5): Absent or Pro or Ala
  misc_feature (6)..(6): Absent or Gly or Thr
  misc_feature (7)..(7): Absent or Lys
  misc_feature (8)..(8): Absent or Leu
  misc_feature (9)..(9): Absent or Glu
  misc_feature (10)..(10): Absent or Ala
  misc_feature (11)..(11): Absent or Glu
  misc_feature (12)..(12): Absent or Glu
  misc_feature (13)..(13): Absent or Tyr
  misc_feature (14)..(14): Absent or Gly
  misc_feature (15)..(15): Absent or Glu or Ala
  misc_feature (16)..(16): Absent or Ser or Met or Lys
  misc_feature (17)..(17): Absent or Arg or Asn or Glu
  misc_feature (18)..(18): Absent or Ser or Gly or Thr
  misc_feature (19)..(19): Absent or Ser or Arg
  misc_feature (20)..(20): Absent or Gln or Arg or Ser
  misc_feature (21)..(21): Absent or Glu or Gly or Arg
  misc_feature (22)..(22): Absent or His or Gly or Ser
  misc_feature (23)..(23): Absent or Ser
  misc_feature (24)..(24): Absent or Ala or Gln or Ser
  misc_feature (25)..(25): Absent or Arg or Lys or Ser
  misc_feature (26)..(26): Absent or His or Gln or Val
  misc_feature (27)..(27): Absent or Ser or Phe
  misc_feature (28)..(28): Absent or Arg or Asp
  misc_feature (29)..(29): Absent or Gly or Ser or Tyr
  misc_feature (30)..(30): Absent or Gly or Leu or Arg
  misc_feature (31)..(31): Absent or Ser or Asn
  misc_feature (32)..(32): Absent or Thr or Gln or Ser
  misc_feature (33)..(33): Absent or Ala or Ser or Thr
  misc_feature (34)..(34): Absent or Glu or Ser or Thr
  misc_feature (35)..(35): Absent or Gln or Thr or Phe or Ser
  misc_feature (36)..(36): Absent or Gln or Ala or Ser or Thr
  misc_feature (37)..(37): Absent or Val or Ala or Ser or Gly or Thr
  misc_feature (38)..(38): Absent or Arg or Tyr or Ser or Thr or His
  misc_feature (39)..(39): Absent or Asn or Asp or Gly
  misc_feature (40)..(40): Absent or Ala or His or Ser
  misc_feature (41)..(41): Absent or Arg or Tyr or Ala or Glu or Ser
  misc_feature (42)..(42): Absent or Ser or Arg or Ala or Ile
  misc_feature (43)..(43): Absent or Val or Pro or Ala or Ser
  misc_feature (44)..(44): Absent or Ser or Asp or Thr
  misc_feature (45)..(45): Absent or Glu or Asp or Ser or Arg
  misc_feature (46)..(46): Absent or Asp or Gly or Ser
  misc_feature (47)..(47): Absent or Tyr or Ile or Arg or Ala or Lys
  misc_feature (48)..(48): Absent or His or Ser or Arg
  misc_feature (49)..(49): Absent or Arg or Ala
  misc_feature (50)..(50): Absent or Glu or Ser or Arg or Asn
  misc_feature (51)..(51): Absent or Gly or Ser or Ala or Thr
  misc_feature (52)..(52): Absent or Gln or Ser or Thr
  misc_feature (53)..(53): Absent or Arg or Ser
  misc_feature (54)..(54): Absent or Ala or Leu or Ser
  misc_feature (55)..(55): Absent or Leu or Val or Ala
  misc_feature (56)..(56): Absent or Arg or Gly or Asp or Tyr
  misc_feature (57)..(57): Absent or Gly
  misc_feature (58)..(58): Absent or Gly or Ile
  misc_feature (59)..(59): Absent or Arg or Val
  misc_feature (60)..(60): Absent or Ser or Asn
  misc_feature (61)..(61): Absent or Asp or Leu or Ser
  misc_feature (62)..(62): Absent or Phe or Leu or Val or Ala
  misc_feature (63)..(63): Absent or Ala or Ser or Lys or Thr
  misc_feature (64)..(64): Absent or Leu or Ser or Lys
  misc_feature (65)..(65): Absent or Leu or Gly or Ser
  misc_feature (66)..(66): Absent or Gly or Ser
  misc_feature (67)..(67): Absent or Leu or Val or Asn
  misc_feature (68)..(68): Absent or Gly or Ser or His
  misc_feature (69)..(69): Absent or Ala or Arg or His
  misc_feature (70)..(70): Absent or Glu or Ala or Asn
  misc_feature (71)..(71): Absent or Arg or Glu
  misc_feature (72)..(72): Absent or Glu or Ser
  misc_feature (73)..(73): Absent or Pro or Tyr or Gly
  misc_feature (74)..(74): Absent or Val or Gly or Ser
  misc_feature (75)..(75): Absent or Glu or Gly or His
  misc_feature (76)..(76): Absent or His or Ser or Asp or Met
  misc_feature (77)..(77): Absent or Arg or Ala or Leu or Gly
  misc_feature (78)..(78): Absent or Arg or Tyr or Asn
  misc_feature (79)..(79): Absent or Glu or Arg or Lys or Ser
  misc_feature (80)..(80): Absent or Val or Thr or Arg or Leu or Ser
  misc_feature (81)..(81): Absent or Arg or Lys or Ser
  misc_feature (82)..(82): Absent or Ser or Gln or Val or Lys or Arg
  misc_feature (83)..(83): Met or Absent or Lys or Glu or Ala or Ser or Gln or Gly
  misc_feature (84)..(84): Gly or Absent or Arg or Glu
  misc_feature (85)..(85): Asn or Absent or Pro or Glu or Gly
  misc_feature (86)..(86): Ser or Met or Ala or Lys or Absent
  misc_feature (87)..(87): Ser or Gly or Ala or Arg or Asp or Glu or Absent
  misc_feature (88)..(88): Ser or Gln or Pro or Lys or Arg or Asp or Absent
  misc_feature (89)..(89): Ser or Gln or Arg or Leu or Ala or Absent
  misc_feature (90)..(90): Ser or Gln or Glu or Arg or Asn or Absent
  misc_feature (91)..(91): Gly or Thr or Lys or Glu or Ile or Ser or Absent
  misc_feature (92)..(92): Arg or Lys or Glu or Gln or Asn or Absent
  misc_feature (93)..(93): His or Glu or Arg or Asn or Ala or Absent
  misc_feature (94)..(94): Gln or Thr or Glu or Ala or Trp or Tyr or Asp or Absent
  misc_feature (95)..(95): Absent or Pro or Ala or Leu or Arg or Met
  misc_feature (96)..(96): Absent or Arg or Asp or Gln or Ser
  misc_feature (97)..(97): Absent or Val or Ile or Leu or Ser or Met
  misc_feature (98)..(98): Absent or Phe or Lys or Val or Ile or Gly
  misc_feature (99)..(99): Absent or Val or Glu or Asn
  misc_feature (100)..(100): Absent or Asp or Arg or Lys or Thr or Asn
  misc_feature (101)..(101): Absent or Pro or Gln or Ser or Leu or Phe or Gly or Val or Ile or Lys
  misc_feature (102)..(102): Absent or Arg or Ser or Thr or Gly
  misc_feature (103)..(103): Absent or Ser or Gly
  misc_feature (104)..(104): Absent or Met or Ser or Arg or Lys
  misc_feature (105)..(105): Absent or Lys or Ile or Arg or Pro
  misc_feature (106)..(106): Glu or Gly or Asn or His or Absent or Cys or Arg or Lys
  misc_feature (107)..(107): Asp or Ala or Glu or Gly or Pro or Ser or His or Thr or Gln or Absent
  misc_feature (108)..(108): Thr or Ala or Gln or His or Asn or Ser or Gly or Lys or Val or Absent or Ile
  misc_feature (110)..(110): Asp or Ser or Asn or Pro or Absent or Glu
  misc_feature (111)..(111): Tyr or Ser or Gly or Asn or Glu or Absent or Lys
  misc_feature (112)..(112): Gly or Ala or Leu or Glu or Arg or Absent or Met or Lys
  misc_feature (114)..(114): Leu or Gln or Ser or Thr or Absent or Arg or Tyr
  misc_feature (115)..(115): Val or Tyr or Ala or Arg or Lys or Absent or Pro
  misc_feature (117)..(117): Pro or Ser or Gln or Tyr or Phe or Thr or His or Absent
  misc_feature (118)..(118): Gly or His or Gln or Absent
  misc_feature (119)..(119): Absent or Gly
  misc_feature (120)..(120): Absent or Gly
  misc_feature (121)..(121): Absent or Ser
  misc_feature (122)..(122): Absent or Asn
  misc_feature (123)..(123): Absent or Asn
  misc_feature (124)..(124): Absent or Asn
  misc_feature (125)..(125): Absent or Ala
  misc_feature (126)..(126): Absent or His
  misc_feature (127)..(127): Absent or Phe
  misc_feature (128)..(128): Absent or Arg
  misc_feature (129)..(129): Absent or Pro
  misc_feature (130)..(130): Absent or Ser
  misc_feature (131)..(131): Absent or Val
  misc_feature (132)..(132): Absent or His
  misc_feature (133)..(133): Absent or Leu
  misc_feature (134)..(134): Absent or Pro
  misc_feature (135)..(135): Absent or Ser
  misc_feature (136)..(136): Absent or Ser
  misc_feature (137)..(137): Absent or Leu
  misc_feature (138)..(138): Absent or Val
  misc_feature (139)..(139): Absent or Ser
  misc_feature (140)..(140): Absent or Leu
  misc_feature (141)..(141): Absent or Arg
  misc_feature (142)..(142): Absent or Gly
  misc_feature (143)..(143): Absent or Gly
  misc_feature (144)..(144): Absent or Thr
  misc_feature (145)..(145): Absent or Gly
  misc_feature (146)..(146): Absent or Ser
  misc_feature (147)..(147): Absent or Leu
  misc_feature (148)..(148): Absent or Gly
  misc_feature (149)..(149): Absent or Leu
  misc_feature (150)..(150): Absent or Ser
  misc_feature (151)..(151): Absent or Lys
  misc_feature (152)..(152): Absent or Thr
  misc_feature (153)..(153): Absent or Glu
  misc_feature (154)..(154): Absent or Leu
  misc_feature (155)..(155): Absent or Asp
  misc_feature (156)..(156): Absent or Ala
  misc_feature (157)..(157): Absent or Arg
  misc_feature (158)..(158): Absent or Cys
  misc_feature (159)..(159): Absent or Gln
  misc_feature (160)..(160): Absent or Pro
  misc_feature (161)..(161): Val or Thr or Ser or Absent
  misc_feature (162)..(162): Tyr or Arg or Gly or Absent or Leu
  misc_feature (163)..(163): Thr or Ser or Val or Arg or Lys or Leu or Absent
  misc_feature (164)..(164): Gly or Ser or Leu or Tyr or Absent
  misc_feature (165)..(165): Pro or Ser or Thr or Glu or Asn or Asp or Met or Absent or Val or Ala
  misc_feature (166)..(166): Absent or Lys or Ser or Gln or His or Asn
  misc_feature (167)..(167): Arg or Gln or Glu or Leu or Cys or Ser or Lys or Absent
  misc_feature (169)..(169): Trp or Met or Phe or Tyr or Val or Absent or Ile
  misc_feature (171)..(171): Gln or Pro or Ile or Lys or Ala or Thr or Cys or Val or Phe or Absent or His
  misc_feature (172)..(172): Ala or Ser or Leu or Pro or Glu or Asp or Lys or Arg or Absent
  misc_feature (173)..(173): Ile or Val or Ala or Lys or Absent
  misc_feature (174)..(174): Val or Ser or Ile or Leu or Absent
  misc_feature (175)..(175): Ser or Ala or Lys or Arg or Gln or Absent
  misc_feature (176)..(176): Gln or Asn or Ser or Gly or Arg or Lys or Absent
  misc_feature (179)..(179): Ala or Thr or Ile or Val or Gly or Leu or Absent
  misc_feature (180)..(180): Ala or Ser or Glu or Asn or Asp or Absent
  misc_feature (181)..(181): Arg or Leu or Gly or Lys or Ser or Absent or Ala or Thr
  misc_feature (186)..(186): Phe or Leu or Arg or Cys or Absent
  misc_feature (187)..(187): Tyr or Arg or Phe or Trp or Leu or His or Absent
  misc_feature (188)..(188): Arg or Pro or Lys or Thr or Absent or Met
  misc_feature (190)..(190): Leu or Ser or Ala or Glu or Asp or Absent or Tyr
  misc_feature (191)..(191): Glu or Pro or Gln or Asn or Asp or Absent
  misc_feature (192)..(192): Glu or Pro or Asp or Ser or Absent
  misc_feature (193)..(193): Tyr or Pro or Phe or Arg or Cys or Ala or Ser or Thr or Absent
  misc_feature (194)..(194): Asp or Leu or Glu or Ser or Ile or Ala or Asn or Thr or Absent or Cys or Gly or Pro
  misc_feature (195)..(195): Glu or Pro or Thr or Ser or Ala or Absent or Tyr or Asn or Gly
  misc_feature (196)..(196): Ser or Ala or Glu or Gly or Thr or Absent
  misc_feature (197)..(197): Trp or His or Absent or Cys or Ala or Gly
  misc_feature (198)..(198): Asp or Leu or Thr or Lys or Absent or His or Tyr or Gly or Ala
  misc_feature (199)..(199): Asp or Ala or Glu or Arg or Thr or Gly or Absent
  misc_feature (200)..(200): Asp or His or Glu or Gln or Phe or Leu or Arg or Absent
  misc_feature (201)..(201): Gln or Ser or Glu or Arg or Asp or Absent
  misc_feature (202)..(202): Ile or Val or Leu or Glu or Absent
  misc_feature (203)..(203): Leu or Lys or Met or Val or Cys or Absent
  misc_feature (204)..(204): Ala or Val or Arg or Ile or Pro or Absent
  misc_feature (205)..(205): Ala or Asp or Val or Ile or Leu or Absent
  misc_feature (206)..(206): Arg or Gln or Ile or Ala or Val or Leu or Cys or Absent
  misc_feature (207)..(207): Lys or Gly or Arg or Asp or Ser or Phe or Tyr or Absent
  misc_feature (208)..(208): Glu or Gly or Ser or Gln or Met or Leu or Absent
  misc_feature (209)..(209): Phe or Leu or Met or Tyr or Ser or His or Absent
  misc_feature (210)..(210): Arg or Val or Pro or Leu or Thr or Tyr or Absent or Ala
  misc_feature (211)..(211): Asp or Pro or Ile or Leu or Ser or Absent
  misc_feature (212)..(212): Ser or Absent or Pro or His or Glu or Val
  misc_feature (213)..(213): Ser or Tyr or Ala or Asn or Leu or Val or Absent or Phe
  misc_feature (214)..(214): Gly or Ala or Pro or Ile or Leu or Asn or Absent or Trp
  misc_feature (215)..(215): Asp or Val or Ala or Phe or Glu or Thr or Arg or Absent or Ser
  misc_feature (216)..(216): Gln or Tyr or Ser or Glu or Asp or Pro or Thr or Absent
  misc_feature (217)..(217): Pro or Thr or Glu or Val or Ala or Gly or Lys or Leu or Arg or Absent or Gln
  misc_feature (218)..(218): Asp or Gly or Ser or Pro or Glu or Tyr or Cys or Absent or His
  misc_feature (219)..(219): Ser or Pro or Asn or Cys or Absent or Met or Leu
  misc_feature (220)..(220): Gln or Lys or Thr or Glu or Absent or Asn or Arg or Ser or Leu or Met or Tyr
  misc_feature (221)..(221): Ser or Asp or Thr or Leu or Glu or Ala or Lys or Absent or Met
  misc_feature (222)..(222): Arg or Tyr or Glu or Phe or Ala or Asp or Thr or Gly or Ser or Absent or Cys or His
  misc_feature (223)..(223): Ser or Asp or Tyr or Glu or Ile or Val or Absent or Thr or Arg
  misc_feature (224)..(224): Asp or Gln or Thr or Lys or Gly or Ser or Glu or Cys or Absent or Phe
  misc_feature (225)..(225): His or Asp or Ile or Val or Glu or Thr or Absent
  misc_feature (226)..(226): Absent or Thr or Pro or Glu or Gly or Ser or Asp
  misc_feature (227)..(227): Absent or Lys or Ser or Leu or Cys or Thr or Gln
  misc_feature (228)..(228): Absent or Asp or Lys or Gly or Tyr or Phe or Leu
  misc_feature (229)..(229): Absent or Ala or Ser or Asn or Leu or Lys
  misc_feature (230)..(230): Absent or Ser or Leu or Gln or Arg or Tyr
  misc_feature (231)..(231): Absent or Ala or Gly or Ile or Met or Val or Arg
  misc_feature (232)..(232): Absent or Ser or Glu or Lys or Arg
  misc_feature (233)..(233): Absent or Thr or Lys or Pro or Ser or Asn or Val or Leu
  misc_feature (234)..(234): Absent or Ser or Gln or Pro or Thr or Ile
  misc_feature (235)..(235): Absent or Thr or Pro or Lys or Arg or His or Ser or Asn or Leu
  misc_feature (236)..(236): Absent or Pro or Asp or Thr or Val or Ser or Glu
  misc_feature (237)..(237): Absent or His or Lys or Ala or Ser or Thr
  misc_feature (238)..(238): Absent or Ala or His or Arg or Gln or Lys
  misc_feature (239)..(239): Absent or Ile or Thr or Ser or Pro or Leu
  misc_feature (240)..(240): Absent or Ser or Thr or Ile or Ala
  misc_feature (241)..(241): Absent or Thr or Gln or Pro
  misc_feature (242)..(242): Absent or Pro or Lys
  misc_feature (243)..(243): Absent or Ser or Phe
  misc_feature (244)..(244): Absent or His or Leu
  misc_feature (245)..(245): Absent or Leu or Ile
  misc_feature (246)..(246): Absent or Ser or Asn
  misc_feature (247)..(247): Absent or Pro or Leu
  misc_feature (248)..(248): Absent or Pro or Met
  misc_feature (249)..(249): Absent or Thr or Gly
  misc_feature (250)..(250): Absent or Ala or Phe
  misc_feature (251)..(251): Absent or Pro or Phe
  misc_feature (252)..(252): Absent or Pro
  misc_feature (253)..(253): Absent or Gln or Phe
  misc_feature (254)..(254): Absent or Val
  misc_feature (255)..(255): Absent or Ala or Ser
  misc_feature (256)..(256): Absent or Ile or Ser
  misc_feature (257)..(257): Absent or Ser
  misc_feature (258)..(258): Absent or Pro
  misc_feature (259)..(259): Absent or Pro
  misc_feature (260)..(260): Absent or Arg
  misc_feature (261)..(261): Absent or His
  misc_feature (262)..(262): Absent or Thr
  misc_feature (263)..(263): Absent or Leu
  misc_feature (264)..(264): Absent or Ser
  misc_feature (265)..(265): Absent or Ser
  misc_feature (266)..(266): Absent or Asn
  misc_feature (267)..(267): Absent or Asn
  misc_feature (268)..(268): Absent or Pro
  misc_feature (269)..(269): Absent or Phe
  misc_feature (270)..(270): Absent or Arg
  misc_feature (271)..(271): Absent or Asp
  misc_feature (272)..(272): Absent or Pro
  misc_feature (273)..(273): Absent or Leu or Glu or Val
  misc_feature (274)..(274): Gly or Phe or Glu or Arg or Ala or Asp or Absent or Thr
  misc_feature (275)..(275): Ser or Val or His or Asn or Asp or Absent or Phe
  misc_feature (276)..(276): Phe or Arg or Met or Leu or Ile or Val or Absent
  misc_feature (277)..(277): Ser or Gln or Asn or Asp or Absent or Arg
  misc_feature (278)..(278): Ser or His or Thr or Ala or Asn or Cys or Absent
  misc_feature (279)..(279): Ser or Ile or Leu or His or Pro or Absent or Tyr
  misc_feature (280)..(280): His or Val or Arg or Met or Lys or Phe or Absent or Tyr
  misc_feature (281)..(281): His or Asp or Ile or Val or Cys or Absent or Gly
  misc_feature (282)..(282): Ser or Arg or Asp or Pro or Lys or His or Asn or Absent
  misc_feature (283)..(283): Ser or Arg or Leu or Ile or Thr or Lys or Asn or Absent
  misc_feature (284)..(284): Lys or Leu or Asp or Thr or Ser or Pro or Absent or Tyr or Ala
  misc_feature (285)..(285): Ser or Ala or Asn or Lys or Absent or Gln
  misc_feature (286)..(286): Ser or Pro or Thr or Arg or Asn or Met or Absent or Tyr
  misc_feature (287)..(287): His or Phe or Thr or Ser or Arg or Tyr or Ile or Absent or Gly or Ala
  misc_feature (288)..(288): Ser or Cys or Phe or Gln or Glu or Tyr or Ile or Absent or Val or Asp
  misc_feature (289)..(289): Lys or Ser or Gln or Arg or Leu or Absent or Glu or Asp
  misc_feature (290)..(290): Arg or Gly or Gln or Tyr or Val or Absent or Ala
  misc_feature (291)..(291): Pro or Thr or Ser or Asn or Arg or Gln or Absent or Ala
  misc_feature (292)..(292): Asn or Asp or Ala or Ser or Gln or Glu or Lys or Absent or Gly
  misc_feature (293)..(293): Gly or Asp or Pro or Arg or Gln or Glu or Absent or Val or Ala
  misc_feature (294)..(294): Gly or Absent or Thr or Ser or Lys or Met or Ala
  misc_feature (295)..(295): Lys or Absent or Pro or Ser or Arg or Ala or Asp or Thr
  misc_feature (296)..(296): Glu or Absent or Ser or Ile or Lys or Leu
  misc_feature (297)..(297): Phe or Absent or Trp or Ile or Leu or Gly or Glu
  misc_feature (298)..(298): Arg or Glu or Met or Asn or Lys or Asp or Absent
  misc_feature (299)..(299): Pro or Asp or Arg or Ala or His or Ser or Ile or Absent or Lys or Cys
  misc_feature (300)..(300): Glu or Ser or Thr or Arg or Leu or Ala or Absent or Gly or Pro
  misc_feature (301)..(301): Val or Leu or Gly or Ile or Met or Lys or Absent or Phe
  misc_feature (302)..(302): Ala or Glu or Ser or His or Asn or Arg or Absent or Cys
  misc_feature (303)..(303): Val or Asp or Pro or Arg or Thr or Lys or Glu or Absent or Ala or Gln or Phe
  misc_feature (304)..(304): Tyr or Ser or Asp or Ala or Lys or Val or Glu or Absent or Ile or Phe or Leu
  misc_feature (305)..(305): Arg or Lys or Gln or Glu or Absent
  misc_feature (307)..(307): Absent or Asp or Pro or Leu or Ala or Gln
  misc_feature (308)..(308): Absent or Gly or Trp or Gln or Arg or Lys
  misc_feature (309)..(309): Absent or Asp or Ala or Gln or Lys or Val
  misc_feature (310)..(310): Absent or Glu or Leu or Asp or Ile
  misc_feature (312)..(312): Absent or Ile or Pro or Glu or Ala
  misc_feature (313)..(313): Absent or Asn or Thr or Lys or Arg or Gln
  misc_feature (314)..(314): Absent or Pro or Asn or Ser or Ala or Ile or Leu or Met
  misc_feature (315)..(315): Absent or Gly or Ser or Lys or Leu or Arg or Asn
  misc_feature (316)..(316): Absent or Ile or Phe or Leu or Asn or Met or Val
  misc_feature (317)..(317): Absent or Leu or His or Arg or Gly
  misc_feature (319)..(319): Absent or Ser or Gly or Leu or Lys or Ala or Arg or Gln
  misc_feature (320)..(320): Absent or Pro or Arg or Lys or Met or Tyr or Gln or Glu or Ala
  misc_feature (321)..(321): Absent or Pro or Ala or Leu or Phe or Met or Ile or Val
  misc_feature (322)..(322): Absent or Ser or Lys or Glu or Leu or Asp or Asn or Gln
  misc_feature (323)..(323): Absent or Arg or Thr or Ala or Lys or Glu or Val or Asp
  misc_feature (324)..(324): Absent or Glu or Leu or Arg or Gln or Lys or Asp
  misc_feature (325)..(325): Absent or Ala or Arg or Gly or Gln or Val or Lys
  misc_feature (326)..(326): Absent or Pro or Ser or Thr or Gly or Lys or Glu
  misc_feature (327)..(327): Absent or Lys or Leu or Gly or Gln or Asn or Ala or His or Glu or Asp
  misc_feature (328)..(328): Absent or Pro or Thr or Val or Phe or Ser or Arg or Lys
  misc_feature (329)..(329): Absent or Pro or Thr or Ser or Asn or Glu or Met or Leu
  misc_feature (330)..(330): Absent or Pro or Ser or Gln or His or Gly or Arg or Lys
  misc_feature (331)..(331): Absent or Ser or Ala or Lys or Gly or Arg
  misc_feature (332)..(332): Absent or Arg or Lys or Cys or Ser or Asp
  misc_feature (333)..(333): Absent or Gln or Thr or Leu or Cys or Pro or Glu or Arg or Ser
  misc_feature (334)..(334): Absent or Arg or Pro or Thr or Glu or Gln or Asp or Gly or Ser or Asn
  misc_feature (335)..(335): Absent or Ala or Ser or Thr or Gly or Asn or Arg
  misc_feature (336)..(336): Absent or Lys or Ser or Asp or Arg or Cys or Ile or Tyr
  misc_feature (337)..(337): Absent or Thr or Asp or Leu or Arg
  misc_feature (338)..(338): Absent or Leu or Met or Ala or Asn
  misc_feature (339)..(339): Absent or Thr or Ala or Lys or Leu
  misc_feature (340)..(340): Absent or Asn or Pro or Trp or Leu or Asp or Ala
  misc_feature (341)..(341): Absent or Lys or Arg or Asp or Gly
  misc_feature (342)..(342): Absent or Glu or Asp or Arg
  misc_feature (343)..(343): Absent or Leu
  misc_feature (344)..(344): Absent or Gln
  misc_feature (345)..(345): Absent or Leu
  misc_feature (346)..(346): Absent or Pro
  misc_feature (347)..(347): Absent or Lys
  misc_feature (348)..(348): Absent or Asp
  misc_feature (349)..(349): Absent or Pro
  misc_feature (350)..(350): Absent or Phe
  misc_feature (351)..(351): Absent or Val
  misc_feature (352)..(352): Absent or Asn
  misc_feature (353)..(353): Absent or Gly
  misc_feature (354)..(354): Absent or Pro or Gln
  misc_feature (355)..(355): Absent or Pro
  misc_feature (356)..(356): Absent or Leu or Ile
  misc_feature (357)..(357): Absent or Met or Glu
  misc_feature (358)..(358): Absent or Val or Ala
  misc_feature (359)..(359): Absent or Lys or Tyr or Gly or Ile
  misc_feature (360)..(360): Absent or Ile or Leu or Ala or Arg or Pro or Cys or Val or Ser
  misc_feature (361)..(361): Absent or Tyr or Ser or Leu or Val
  misc_feature (362)..(362): Absent or Arg or Lys or Ser or Gln or Asp
  misc_feature (363)..(363): Gly or Phe or Asp or Asn or Thr or Absent or Ser or Glu
  misc_feature (364)..(364): Ala or Asn or Pro or Gly or Arg or Absent or Lys or Ser
  misc_feature (365)..(365): Ile or Ser or Ala or Absent or Arg or Thr or Tyr or Val
  misc_feature (366)..(366): Glu or Ser or Absent or Thr or Asn or Val or Ile
  misc_feature (367)..(367): Cys or Phe or Absent or Gln or Glu or Ala or Arg or Ile or Val or Thr
  misc_feature (368)..(368): Pro or Gly or Absent or Val or Met or Ala or Glu
  misc_feature (369)..(369): Ile or Ser or Absent or Val or Thr or Gln or Pro
  misc_feature (370)..(370): Cys or Ser or Absent or Thr or Ala or Gly or Leu or Lys
  misc_feature (371)..(371): Phe or Leu or Absent or Asn or Glu or Asp
  misc_feature (372)..(372): Leu or Ala or Absent or Asn or Thr or Met or Val
  misc_feature (373)..(373): Tyr or Asn or Asp or Absent or Glu or Ala or Leu
  misc_feature (375)..(375): Pro or Asn or Absent or Ala or Gly or Ser or Arg
  misc_feature (376)..(376): Pro or Thr or Asn or Glu or Ser or Lys or Arg or Absent or His or Asp
  misc_feature (377)..(377): Asn or Pro or Ser or Tyr or His or Absent or Ala or Thr or Lys or Ile
  misc_feature (378)..(378): Ile or Leu or Met or Arg or Absent or Pro or Ala or Ser or Asp or Thr or Cys
  misc_feature (379)..(379): Asn or Thr or Absent or Asp or Gly or Val or Ala or Glu or Ser
  misc_feature (380)..(380): His or Phe or Met or Lys or Val or Ile or Absent or Asp or Ala or Thr
  misc_feature (381)..(381): Ser or Thr or Absent or Glu or Leu or Gln or Pro
  misc_feature (382)..(382): Arg or Asn or Absent or Ile or Phe or Tyr
  misc_feature (383)..(383): Cys or Ser or Absent or Asn or Val
  misc_feature (384)..(384): Absent or Phe or Pro
  misc_feature (385)..(385): Absent or Leu or Trp
  misc_feature (386)..(386): Absent or Asp or Phe
  misc_feature (387)..(387): Absent or Trp or Ala
  misc_feature (388)..(388): Absent or Gly
  misc_feature (389)..(389): Absent or Tyr
  misc_feature (390)..(390): Absent or Gly
  misc_feature (391)..(391): Absent or Asp
  misc_feature (392)..(392): Absent or Arg
  misc_feature (393)..(393): Absent or Gln
  misc_feature (394)..(394): Absent or Pro
  misc_feature (395)..(395): Absent or Gln
  misc_feature (396)..(396): Absent or Val
  misc_feature (397)..(397): Absent or Leu
  misc_feature (398)..(398): Absent or Glu
  misc_feature (399)..(399): Absent or Thr
  misc_feature (400)..(400): Absent or Leu
  misc_feature (401)..(401): Absent or Asp
  misc_feature (402)..(402): Absent or Ser
  misc_feature (403)..(403): Absent or Arg
  misc_feature (404)..(404): Absent or Glu
  misc_feature (405)..(405): Absent or Ser
  misc_feature (406)..(406): Absent or Asn
  misc_feature (407)..(407): Absent or Ala
  misc_feature (408)..(408): Absent or Pro
  misc_feature (409)..(409): Absent or Arg
  misc_feature (410)..(410): Absent or Leu
  misc_feature (411)..(411): Absent or Asn
  misc_feature (412)..(412): Absent or Pro
  misc_feature (413)..(413): Absent or Tyr
  misc_feature (414)..(414): Absent or Leu
  misc_feature (415)..(415): Absent or Trp
  misc_feature (416)..(416): Absent or Val
  misc_feature (417)..(417): Absent or Glu
  misc_feature (418)..(418): Absent or Gly
  misc_feature (419)..(419): Absent or Asp
  misc_feature (420)..(420): Absent or Tyr
  misc_feature (421)..(421): Absent or Arg
  misc_feature (422)..(422): Absent or Arg
  misc_feature (423)..(423): Absent or Ser
  misc_feature (424)..(424): Absent or Gly
  misc_feature (425)..(425): Absent or Gly
  misc_feature (426)..(426): Absent or Phe
  misc_feature (427)..(427): Absent or Asp
  misc_feature (428)..(428): Absent or Ala
  misc_feature (429)..(429): Absent or Ala
  misc_feature (430)..(430): Absent or Ala
  misc_feature (431)..(431): Absent or Pro
  misc_feature (432)..(432): Cys or Absent or Ser or Ala or Val
  misc_feature (433)..(433): Asp or His or Ala or Leu or Glu or Absent or Gln or Ile or Pro
  misc_feature (434)..(434): Gln or Ser or Absent or Lys or Phe or Pro
  misc_feature (435)..(435): Ala or Pro or Thr or Absent or Ser or Tyr or Lys or Asn or Asp or Phe or Leu
  misc_feature (436)..(436): Ile or Val or Absent or Ala or Asn or Leu or Arg or Thr or Asp or Gln
  misc_feature (437)..(437): Cys or Ser or Absent or Glu or Arg or Ala or Thr or Lys
  misc_feature (438)..(438): Thr or Ser or Ala or Absent or Pro or Leu or Lys or Glu or Val
  misc_feature (439)..(439): Glu or Gly or Absent or Asn or Met or Leu or Val or Ile or Gln
  misc_feature (440)..(440): Cys or Ser or Absent or Thr or Glu or Asp or Ile or Val or Gln
  misc_feature (441)..(441): Phe or Gly or Absent or Val or Asp or Leu or Ser or Ala or His or Thr or Glu
  misc_feature (442)..(442): Val or Asp or Absent or Pro or Glu or Gly or Ser or Thr or Asn
  misc_feature (443)..(443): Gln or Absent or Ala or Glu or Ser or Asp or Gly or Val
  misc_feature (444)..(444): Ile or Met or Gly or Absent or Leu or Thr or Lys or Ser or Glu or Cys
  misc_feature (445)..(445): Lys or Gly or Absent or Ser or Val or Ala or Leu or Ile or Arg or Cys
  misc_feature (446)..(446): Arg or Ala or Absent or Gln or Ser or Pro or Val
  misc_feature (447)..(447): Ala or Pro or Gln or Leu or Absent or Ser or Gly
  misc_feature (448)..(448): Glu or Asp or Thr or Absent or Gln or Cys or Ser
  misc_feature (449)..(449): Pro or Thr or Absent or Asp or Asn or Tyr or Phe or Cys or Leu
  misc_feature (450)..(450): Thr or His or Pro or Absent or Glu or Ser or Ala or Leu or Asn
  misc_feature (451)..(451): Thr or Ser or Pro or Trp or Absent or Ile or Cys or Leu
  misc_feature (452)..(452): Absent or Pro or Arg or Gly or Ala or Ser
  misc_feature (453)..(453): Absent or Glu or Thr or Val or His or Gly
  misc_feature (454)..(454): Absent or Arg or His or Ser or Pro or Gly
  misc_feature (455)..(455): Absent or His or Asn or Thr or Pro or Tyr or Ser or Ala
  misc_feature (456)..(456): Absent or Asp or Leu or Cys or Ser or Pro or Gln
  misc_feature (457)..(457): Absent or Glu or Pro or Asp or Asn or Gln or Val or Met or Ala or Thr
  misc_feature (458)..(458): Absent or Pro or Asn or Val or Ala or Gln or Asp or Thr or Ile or Ser
  misc_feature (459)..(459): Absent or Glu or Asn or Asp or Ser or Pro or Arg or Met
  misc_feature (460)..(460): Absent or Pro or Ser or Ala or Gln or His or Arg or Met
  misc_feature (461)..(461): Absent or Asp or Glu or Ala or Asn or Ile or Gly or His or Pro or Trp or Ser
  misc_feature (462)..(462): Absent or Thr or Gln or Leu or Ala or Ser or Pro or Phe
  misc_feature (463)..(463): Absent or Leu or Thr or Pro or Glu or Ser or Ile or His or Arg or Ala
  misc_feature (464)..(464): Absent or Leu or His or Asp or Asn or Ala or Arg or Pro or Ser or Tyr or Thr or Gly
  misc_feature (465)..(465): Absent or Gly or Pro or Glu or Ala or X or Arg or Lys
  misc_feature (466)..(466): Absent or Asp or Met or Arg or Val or Gly or Ala or Leu or His
  misc_feature (467)..(467): Absent or Glu or Lys or Ser or His or Asn or Phe or Thr
  misc_feature (468)..(468): Absent or Pro or Asp or Leu or Arg or Gly
  misc_feature (469)..(469): Thr or Gln or Glu or Pro or Absent or Asp
  misc_feature (470)..(470): His or Asn or Leu or Gly or Asp or Ala or Absent or Glu
  misc_feature (471)..(471): Leu or Pro or Asp or Gln or Thr or Arg or Absent or Glu or Asn
  misc_feature (472)..(472): Val or Pro or Leu or Arg or Absent or Phe or Thr or Ile
  misc_feature (473)..(473): Ser or Ile or Val or Glu or Absent or Asp or Ala
  misc_feature (474)..(474): Absent or Ser or Leu or Tyr or Val or Phe or Met
  misc_feature (475)..(475): Glu or Thr or Absent or Asp or Asn
  misc_feature (476)..(476): Pro or Arg or Absent or Leu or Ile
  misc_feature (477)..(477): Ala or Arg or Thr or Glu or Absent
  misc_feature (478)..(478): Ala or Ser or His or Asn or Met or Absent or Asp or Glu
  misc_feature (479)..(479): Cys or Arg or Absent or Ile or Leu or Met
  misc_feature (480)..(480): Pro or Ala or Absent or Met
  misc_feature (481)..(481): Tyr or Phe or Gln or Absent or Val or Ile or Leu
  misc_feature (482)..(482): Cys or Leu or Absent or Met
  misc_feature (483)..(483): Val or Ala or Ser or Absent or Glu or Phe
  misc_feature (484)..(484): Gln or Glu or Met or Thr or Ser or His or Absent or Ala or Leu
  misc_feature (485)..(485): Glu or Pro or Ser or Ala or Absent or Ile or Tyr
  misc_feature (486)..(486): Asn or Asp or Glu or Thr or Absent or Trp or Tyr
  misc_feature (487)..(487): Phe or His or Absent or Leu or Pro or Arg
  misc_feature (488)..(488): Gly or Gln or Absent or Ser
  misc_feature (489)..(489): Ile or Val or Arg or Absent or Leu or Met
  misc_feature (490)..(490): Val or Thr or Met or Ile or Absent or Gln or Asn
  misc_feature (491)..(491): Tyr or Glu or Absent or Gln
  misc_feature (492)..(492): Asn or Thr or Ser or Lys or Asp or Glu or Absent
  misc_feature (493)..(493): Pro or Glu or Absent or Gln or Thr or Asn
  misc_feature (494)..(494): Pro or Arg or Leu or Ala or Absent or Gly
  misc_feature (495)..(495): Pro or Glu or His or Ala or Ser or Ile or Absent or Thr or Arg
  misc_feature (496)..(496): Absent or Ser or Gly or Asp or Glu or Arg or Gln or Leu or Ile
  misc_feature (497)..(497): Absent or Ile or Pro or Phe or Arg or Leu or Ala or His or Met or Lys or Val or Gly
  misc_feature (498)..(498): Absent or Glu or Gly or Arg or Ile or His or Asn
  misc_feature (499)..(499): Absent or His or Ala or Arg or Leu or Thr or Phe or Asn or Ser or Pro
  misc_feature (500)..(500): Trp or Ala or Lys or Gly or Arg or Absent or Ser or Leu or Ile or Val
  misc_feature (501)..(501): Arg or Ala or Leu or Ile or His or Absent or Asp or Ser or Cys or Tyr or Phe or Pro
  misc_feature (502)..(502): Ala or Arg or Gln or Asn or Asp or Val or Absent or Gly or Thr
  misc_feature (503)..(503): Gly or Ser or Tyr or Gln or Absent or Glu or Asp or Asn
  misc_feature (504)..(504): Ile or Ser or Ala or Absent or Lys or Glu or Tyr or Phe
  misc_feature (505)..(505): Gly or Ala or Asn or Absent or Cys or Ile or Trp or Thr or Ser or Phe or Met
  misc_feature (506)..(506): Ser or Gly or Lys or Absent or Arg or Pro or Glu
  misc_feature (507)..(507): Glu or Gly or Ala or Pro or Arg or Absent or Ser or Lys or Val or Phe
  misc_feature (508)..(508): Gly or Asp or Pro or Thr or Absent or Val or Arg or Glu or Ala or Ile
  misc_feature (509)..(509): Ala or Asp or Val or Ser or Glu or Absent or Pro or Gln or Asn or His
  misc_feature (510)..(510): Ser or Ala or His or Tyr or Absent or Asn or Phe
  misc_feature (511)..(511): Pro or Ala or Tyr or Arg or Lys or Gly or Absent or Val or Ile or Thr
  misc_feature (512)..(512): Ile or Asn or Ala or Leu or Val or Met or Absent or Pro or Thr
  misc_feature (513)..(513): Thr or Asp or Lys or Ala or Ser or Pro or Arg or Absent or Glu or Gln
  misc_feature (514)..(514): Absent or Gly or Asn or Pro
  misc_feature (515)..(515): Absent or Asn or Pro or Arg or Leu or His
  misc_feature (516)..(516): Absent or Gly or Ile or Met or Ala or Ser or Asp or Glu or Gln
  misc_feature (517)..(517): Absent or Asp or Val or Arg or Leu or Tyr or His or Pro
  misc_feature (518)..(518): Absent or Glu or Val or Tyr or Asn or Pro or Ser or Thr
  misc_feature (519)..(519): Absent or Ser or His or Glu or Asn or Ala or Val or Pro
  misc_feature (520)..(520): Pro or Ala or Ser or Absent or Arg or Thr or Leu or Glu
  misc_feature (521)..(521): Ala or Thr or Ile or Ser or Absent or Asp or Glu or Leu or Phe or Pro or Gln
  misc_feature (522)..(522): Asp or Ala or Ser or Gln or Absent or Pro or Arg
  misc_feature (523)..(523): Val or Ala or Asp or Cys or Lys or Glu or Absent or Ser or Arg or Met or Thr or Gln
  misc_feature (524)..(524): Asn or Ala or Ser or Ile or Leu or Absent or Glu or Val or Pro
  misc_feature (525)..(525): Arg or Asn or Gly or Ser or Asp or Thr or Absent or Leu or Pro or Gln or Phe
  misc_feature (526)..(526): Absent or Asp or Ala or Pro or Leu or Val
  misc_feature (527)..(527): Absent or Ser or Asp or Leu or Gly or Ile or Val or Gln or Pro or Ala
  misc_feature (528)..(528): Absent or Ser or Gly or Leu or Thr or Val or Ala
  misc_feature (529)..(529): Absent or Asp or Glu or Asn or Ala or Gly or Pro or Ser
  misc_feature (530)..(530): Absent or Gly or Asn or Arg or Thr or Pro or Ser
  misc_feature (531)..(531): Absent or Ile or Ser or Met or Arg or Ala or Cys or Leu
  misc_feature (532)..(532): Absent or Asp or Ser or Ala or Thr or Cys or Glu
  misc_feature (533)..(533): Absent or Thr or Asn or Ala or Pro or Ser or Met or Ile
  misc_feature (534)..(534): Absent or Thr or Gly or Asn or Pro or Ser or Lys
  misc_feature (535)..(535): Absent or Asn or Ser or Asp or Pro or His
  misc_feature (536)..(536): Absent or Thr or Glu or Pro or Ser or Gly
  misc_feature (537)..(537): Absent or Thr or Gly or Ala
  misc_feature (538)..(538): Absent or Gly or Val
  misc_feature (539)..(539): Absent or Lys or Gly or Pro
  misc_feature (540)..(540): Absent or Gly or Asp or Glu
  misc_feature (541)..(541): Absent or Glu or Asp or Pro
  misc_feature (542)..(542): Absent or Ile or Ser or Glu
  misc_feature (543)..(543): Absent or Thr or Ser
  misc_feature (544)..(544): Absent or Ser or Gly or Trp
  misc_feature (545)..(545): Absent or Asn or Glu or His
  misc_feature (546)..(546): Absent or Ser or Asp or Gln
  misc_feature (547)..(547): Absent or Ala or Arg or His
  misc_feature (548)..(548): Absent or Thr or Ser
  misc_feature (549)..(549): Absent or Ala or Val or Gly
  misc_feature (550)..(550): Absent or Ala or Thr or Arg
  misc_feature (551)..(551): Absent or Ala or Asp or Gln
  misc_feature (552)..(552): Absent or Ala or Gly
  misc_feature (553)..(553): Absent or Thr or Ala
  misc_feature (554)..(554): Absent or Ala or Arg
  misc_feature (555)..(555): Arg or Phe or Absent or Thr or Ala or Ser
  misc_feature (556)..(556): Ile or Ala or Absent or Pro or Arg or Val or Gly
  misc_feature (557)..(557): Glu or Met or Ala or Pro or Absent or Gly
  misc_feature (558)..(558): Gln or Met or Asp or Ser or Pro or Absent or Asn or Leu or Tyr or Phe
  misc_feature (559)..(559): Ser or Ala or Asp or His or Val or Absent or Ile
  misc_feature (560)..(560): Ala or Ile or Val or Leu or His or Gln or Asn or Absent or Gly or Cys
  misc_feature (561)..(561): Ile or Gly or Ala or Val or His or Ser or Thr or Absent
  misc_feature (562)..(562): Pro or Thr or Asp or Ser or Val or Leu or Absent or Ile or Glu
  misc_feature (563)..(563): Absent or Gly or Lys or Glu or Ser or Ala or Cys
  misc_feature (564)..(564): Absent or Gly or Leu or Pro or Lys or Asp or Ala or Phe or Val
  misc_feature (565)..(565): Absent or Ala or Met or Pro or Arg or Leu
  misc_feature (566)..(566): Absent or Ala or His or Asn or Pro or Lys or Leu or Gln or Thr
  misc_feature (567)..(567): Absent or Val or Met or Pro or Asn or Arg or Glu
  misc_feature (568)..(568): Tyr or Thr or Ser or Gly or Absent or Ala or Gln or Arg or Lys or His
  misc_feature (569)..(569): His or Gly or Thr or Absent or Leu or Gln
  misc_feature (570)..(570): Lys or Thr or Ala or Arg or Absent or Glu or Met or Gln or Pro
  misc_feature (571)..(571): Lys or Gly or Arg or Absent or Thr or Val or Met or Pro or Ala or Ser
  misc_feature (572)..(572): Arg or Lys or Tyr or Absent or Ser or Gly or Val
  misc_feature (573)..(573): Gln or Lys or Arg or Ala or Gly or Absent or Pro or Glu or Met
  misc_feature (574)..(574): Lys or Ser or Val or Thr or Gly or Absent or Asn or Glu or Asp
  misc_feature (575)..(575): Ser or Ile or Glu or Absent or Thr or Phe
  misc_feature (576)..(576): Tyr or Leu or Ile or Val or Met or Gly or Absent or Thr or Ser or Phe
  misc_feature (577)..(577): Ser or Ala or Gln or Absent or His or Val or Tyr
  misc_feature (578)..(578): Ala or Val or His or Gly or Absent or Asn or Pro or Ser or Met
  misc_feature (579)..(579): Asp or Thr or Asn or Arg or Absent or Ile or His or Ser or Gln or Ala
  misc_feature (580)..(580): Ser or Asp or Asn or His or Ala or Gly or Absent
  misc_feature (581)..(581): Pro or Ser or Arg or Absent or His or Thr or Val or Gly or Glu or Asn
  misc_feature (582)..(582): Glu or Ser or Asn or Gly or Absent or Thr or Arg
  misc_feature (583)..(583): Val or Ile or Arg or Absent or Pro or Met or Asn or Leu or Thr or Ala
  misc_feature (584)..(584): Val or Ile or Gly or Absent or Thr or Asn or Pro or Ala or Tyr or Phe
  misc_feature (585)..(585): Thr or Gly or Absent or Ser or Val or Gln or Ala or Pro
  misc_feature (586)..(586): Absent or Ser
  misc_feature (587)..(587): Absent or Leu
  misc_feature (588)..(588): Absent or Gln
  misc_feature (589)..(589): Absent or Pro
  misc_feature (590)..(590): Absent or Ser
  misc_feature (591)..(591): Absent or Leu
  misc_feature (592)..(592): Absent or Ser
  misc_feature (593)..(593): Absent or Asp
  misc_feature (594)..(594): Absent or Asp
  misc_feature (595)..(595): Absent or His
  misc_feature (596)..(596): Absent or Ser
  misc_feature (597)..(597): Absent or Val
  misc_feature (598)..(598): Absent or Pro
  misc_feature (599)..(599): Absent or Glu
  misc_feature (600)..(600): Absent or Val
  misc_feature (601)..(601): Absent or Ser
  misc_feature (602)..(602): Absent or Asn
  misc_feature (603)..(603): Absent or Ile
  misc_feature (604)..(604): Absent or Asn
  misc_feature (605)..(605): Absent or Glu
  misc_feature (606)..(606): Absent or Glu
  misc_feature (607)..(607): Absent or Pro
  misc_feature (608)..(608): Absent or Leu
  misc_feature (609)..(609): Absent or Val
  misc_feature (610)..(610): Absent or Ser
  misc_feature (611)..(611): Absent or Thr
  misc_feature (612)..(612): Absent or Gly
  misc_feature (613)..(613): Absent or Asp
  misc_feature (614)..(614): Absent or Ala
  misc_feature (615)..(615): Absent or Pro
  misc_feature (616)..(616): Absent or Ala
  misc_feature (617)..(617): Absent or Ser
  misc_feature (618)..(618): Absent or Gln
  misc_feature (619)..(619): Absent or Ala
  misc_feature (620)..(620): Absent or His
  misc_feature (621)..(621): Absent or Glu
  misc_feature (622)..(622): Absent or Ser
  misc_feature (623)..(623): Absent or Ser
  misc_feature (624)..(624): Absent or Gln
  misc_feature (625)..(625): Absent or Arg
  misc_feature (626)..(626): Absent or Ser
  misc_feature (627)..(627): Absent or Glu
  misc_feature (628)..(628): Absent or Glu
  misc_feature (629)..(629): Absent or Leu
  misc_feature (630)..(630): Absent or Asp or Pro
  misc_feature (631)..(631): Absent or Asp or Gln
  misc_feature (632)..(632): Absent or Leu or Ser
  misc_feature (633)..(633): Absent or Met or Gly
  misc_feature (634)..(634): Absent or Arg
  misc_feature (635)..(635): Absent or Leu or Glu
  misc_feature (636)..(636): Absent or Glu or Asn
  misc_feature (637)..(637): Absent or Ala or Gly or Val
  misc_feature (638)..(638): Ile or Val or Thr or Ser or Ala or Absent or Cys or Phe or Gln
  misc_feature (639)..(639): Asp or Phe or Absent or Arg or Ser or Pro or Asn
  misc_feature (640)..(640): Gln or Arg or Met or Asn or Ile or Absent or Glu or Tyr or Leu
  misc_feature (641)..(641): Ile or Val or Leu or Absent or Met or Ser or Phe
  misc_feature (642)..(642): Arg or Gly or Absent or Pro or Met
  misc_feature (643)..(643): Pro or Met or Absent or Val or Leu or Asp or Arg
  misc_feature (644)..(644): Asp or Absent or Val or Pro or Asn
  misc_feature (645)..(645): Trp or Asp or Absent or Val or Gly or Ser or Cys
  misc_feature (646)..(646): Glu or His or Ser or Ala or Asp or Absent or Asn or Thr or Gly
  misc_feature (647)..(647): Ala or Thr or Lys or Gln or Tyr or Absent or Cys or Ser or Arg or Asn or Met or Ile
  misc_feature (648)..(648): Lys or Thr or Glu or Arg or Absent or Ser or Asp or Ala
  misc_feature (649)..(649): Leu or Arg or Absent or Gly or Ser or Phe or His
  misc_feature (650)..(650): Ala or Ile or Asn or Leu or Absent or Arg or Tyr or Gly
  misc_feature (651)..(651): Ala or Gln or Lys or Ser or Arg or Absent or Gly or Tyr or Asn
  misc_feature (652)..(652): Val or Ala or Glu or Absent or Lys or Asp or Arg or Leu or Met
  misc_feature (653)..(653): Arg or Glu or Lys or Ser or Absent or Ile or His or Leu or Met or Cys or Gly
  misc_feature (654)..(654): Ala or Thr or Asn or Ser or Gly or Absent or Asp or Glu or Val
  misc_feature (655)..(655): Ala or Arg or Gln or Lys or Absent or Val or Leu
  misc_feature (656)..(656): Val or Ala or Leu or Ser or Absent or Glu or Asp
  misc_feature (657)..(657): Ala or Ser or Absent or Asn or Val or Met
  misc_feature (658)..(658): Arg or Ala or Absent or Ser or Asp or Glu or Val or Asn
  misc_feature (659)..(659): Arg or Lys or Absent or Ser or Gly or Asn or His
  misc_feature (660)..(660): Ala or Ser or Ile or Absent or Arg or Tyr or Leu or Pro
  misc_feature (661)..(661): Asn or Ala or Absent or Asp or Ser or Glu
  misc_feature (662)..(662): Arg or Thr or Ala or Asn or Asp or Absent or Phe or Pro or Ser
  misc_feature (663)..(663): Arg or Ala or Gly or Absent or Glu or Thr or Trp
  misc_feature (664)..(664): Ile or Val or Asn or Thr or Ser or Ala or Absent or Lys or Gln or Glu
  misc_feature (665)..(665): Ile or Ala or Pro or Absent or Leu or Ser or Gly or Asn
  misc_feature (666)..(666): Met or Leu or Ile or Phe or Absent or Ala or Ser
  misc_feature (667)..(667): Arg or His or Ser or Absent or Asn or Asp
  misc_feature (668)..(668): Gln or Ala or Thr or Val or Ile or Absent or Trp or Asn or Glu or Met
  misc_feature (669)..(669): Val or Thr or Ala or Ser or Pro or Absent or Met or Gly
  misc_feature (670)..(670): Gly or Ala or Asn or Leu or Absent or Ser or Pro
  misc_feature (671)..(671): Asp or Phe or Tyr or Arg or Leu or Gly or Absent or Ser or Pro or Asn
  misc_feature (672)..(672): Arg or Val or Met or Leu or Ile or Gly or Absent or Thr or Asp or Tyr or Cys
  misc_feature (673)..(673): Leu or Glu or Met or Val or Gly or Absent or Gln or Cys or Asp or Ser or Thr
  misc_feature (674)..(674): Ile or Gly or Asn or Asp or Arg or Absent or Lys or Thr
  misc_feature (675)..(675): Pro or Gly or Asn or Asp or Arg or Absent or Glu or Met
  misc_feature (676)..(676): Val or Ile or Asn or Pro or Gly or Asp or Absent or Tyr or Ala or Glu
  misc_feature (677)..(677): Gly or His or Asp or Ser or Ile or Absent or Lys or Val or Thr or Met
  misc_feature (678)..(678): Ile or Glu or Gly or Thr or Ser or Asn or Ala or Absent or Val
  misc_feature (679)..(679): Gly or Ser or Val or Pro or Arg or Gln or Absent
  misc_feature (680)..(680): Arg or Ser or Ala or Gly or Thr or Asn or Absent or Asp or Glu
  misc_feature (681)..(681): Val or Ser or Gly or Glu or Tyr or Leu or Absent or Asp or His
  misc_feature (682)..(682): Gln or Arg or Ser or Pro or Absent or Asn or Gly or Val
  misc_feature (683)..(683): Thr or Met or Absent or Arg or Asn or Glu or Gln
  misc_feature (684)..(684): Pro or Gly or Absent or Arg or Trp or Cys
  misc_feature (685)..(685): Glu or Ala or Absent or Arg or Asn or Leu or Gly or Val or Ser
  misc_feature (686)..(686): Glu or Asp or Absent or Gly or Ala or Ile or Thr
  misc_feature (687)..(687): Ala or Leu or Absent or Met or Gly or Asp
  misc_feature (688)..(688): Ala or Absent or Leu or Ser or Gln or Arg or His
  misc_feature (689)..(689): Glu or Ala or Absent or Arg or Ser or Gly or Trp or Leu
  misc_feature (690)..(690): Gly or Ala or Absent or Arg or Thr or Ser
  misc_feature (691)..(691): Gly or Ala or Absent or Thr or His or Glu or Asp or Gln
  misc_feature (692)..(692): Asn or Glu or Absent or Ala or His or Arg or Val or Leu or Gly
  misc_feature (693)..(693): Ser or Absent or Gly or Met or Val or His or Ala or Gln
  misc_feature (694)..(694): Gly or Absent or Gln or Glu or His
  misc_feature (695)..(695): Absent or Arg or Asp or Thr or Val or His or Ala
  misc_feature (696)..(696): Absent or Ile or Ser or Ala or Gly or Arg
  misc_feature (697)..(697): Absent or Asn or Pro
  misc_feature (698)..(698): Absent or Leu or Gly
  misc_feature (699)..(699): Absent or Asn or Gly
  misc_feature (700)..(700): Absent or Gly or Arg
  misc_feature (701)..(701): Absent or Pro or Thr
  misc_feature (702)..(702): Absent or Gly or Ala
  misc_feature (703)..(703): Absent or Gly or Pro
  misc_feature (704)..(704): Absent or Ser
  misc_feature (705)..(705): Absent or Ile or His
  misc_feature (706)..(706): Absent or Ile or Val
  misc_feature (707)..(707): Absent or Leu or Asn
  misc_feature (708)..(708): Absent or Asn or Ala
  misc_feature (709)..(709): Absent or Asp or Met
  misc_feature (710)..(710): Absent or Gly or Ala or Glu or Thr or His or Ile
  misc_feature (711)..(711): Absent or Gln or Tyr or Met or Ser or His
  misc_feature (712)..(712): Absent or Asn or Leu or Phe or Tyr
  misc_feature (713)..(713): Absent or Trp or Ala or Met or Ser or Glu or Thr
  misc_feature (714)..(714): Absent or Pro or Glu or Arg or Ser or Met or Asn or Gly
  misc_feature (715)..(715): Absent or Gly or Arg or Ser
  misc_feature (716)..(716): Absent or Ala or Arg or Val or Glu or Asp
  misc_feature (717)..(717): Absent or Ala or Val or Ser or Pro or Thr or Glu or Met or Ile
  misc_feature (718)..(718): Absent or Pro or Val or Gly or Glu or Ser or Ala or Thr or Met
  misc_feature (719)..(719): Absent or Val or Thr or Asn or Glu or Ala or Ser or Asp
  misc_feature (720)..(720): Absent or Ala or Asp or Asn or Glu or Ser
  misc_feature (721)..(721): Absent or Thr or Ser or Arg or Asn or Gln or Asp or Ala
  misc_feature (722)..(722): Ser or Arg or Asp or Gln or Gly or Leu or Absent
  misc_feature (723)..(723): Arg or Ser or Asn or Phe or Gln or Ala or Absent or Pro or Tyr or Gly or Glu or Thr
  misc_feature (724)..(724): Arg or Ser or Ala or Asn or Met or Absent or Trp or Val or Ile or Leu or Glu
  misc_feature (725)..(725): Arg or Ser or Ala or Absent or Glu or Thr or Gln or Pro or Leu
  misc_feature (726)..(726): Arg or Ser or Pro or Ala or Leu or Ile or Absent or Val or Gln
  misc_feature (727)..(727): His or Ser or Thr or Val or Arg or Glu or Absent or Pro or Tyr or Leu or Met
  misc_feature (728)..(728): His or Arg or Asp or Ser or Asn or Met or Absent or Leu or Pro
  misc_feature (729)..(729): Pro or Gln or Ser or Thr or Arg or Asn or Absent or Ile or Phe
  misc_feature (730)..(730): Ala or Ser or Asn or Thr or Tyr or Met or Absent or Pro or Gly
  misc_feature (731)..(731): Asn or Arg or His or Thr or Ala or Ser or Absent or Glu or Pro or Asp
  misc_feature (732)..(732): Gly or Glu or Asn or Ser or Asp or Absent or Pro
  misc_feature (733)..(733): Absent or Ala or Ser or Pro
  misc_feature (734)..(734): Absent or Asn or Glu or Arg or Thr or Leu
  misc_feature (735)..(735): Absent or Asp or Glu or Asn or Pro
  misc_feature (736)..(736): Absent or Gly or Gln or Glu or Pro or Asp
  misc_feature (737)..(737): Absent or Val or Gln or Leu or Asn or Gly or Ala or Glu or Phe or Ile or Pro
  misc_feature (738)..(738): Absent or His or Arg or Ala or Ser or Gln or Gly or Asp
  misc_feature (739)..(739): Glu or Gln or Pro or Ser or Thr or Arg or Absent or Asn or Gly
  misc_feature (740)..(740): Leu or Absent or Pro or Gly or Gln or Phe or Ser or Ile
  misc_feature (741)..(741): Gly or Ala or Absent or Arg or Ser or Gln or Pro or Phe or Val or Tyr
  misc_feature (742)..(742): Thr or Arg or Absent or Ala or Phe or Gln or Pro or Gly or Ser
  misc_feature (743)..(743): Ile or Leu or Absent or Ser or Gly or Glu or Asn or Pro or Met
  misc_feature (744)..(744): Val or Met or Absent or Ser or Gly or Asn or Pro or Asp or Ala
  misc_feature (745)..(745): Gly or Arg or Absent or Ser or Glu or Asp or Pro or Thr or Ala
  misc_feature (746)..(746): Met or Ala or Arg or Absent or Asn or Gly or Lys or Leu or Glu or Ser
  misc_feature (747)..(747): Gly or Ala or Ser or Absent or Asn or Val or Pro or Met or His
  misc_feature (748)..(748): Absent or Asn or Arg or Met or Thr or Leu or Ile or Phe
  misc_feature (749)..(749): Gly or Ala or Ile or Thr or Tyr or Val or Absent or Arg
  misc_feature (750)..(750): Gln or Glu or Asp or Ala or Asn or Absent or Pro
  misc_feature (751)..(751): Asp or Glu or Thr or Absent
  misc_feature (752)..(752): Leu or Met or Phe or Ile or Val or Thr or Absent or Ser
  misc_feature (753)..(753): Glu or Val or Absent or Phe or Ile
  misc_feature (754)..(754): Glu or Gln or Absent
  misc_feature (755)..(755): Leu or Ala or Ile or Met or Glu or Arg or Absent
  misc_feature (756)..(756): Met or Glu or Absent or Gln
  misc_feature (757)..(757): Leu or Ile or Met or Gly or Absent
  misc_feature (758)..(758): Met or Ser or Arg or Glu or Absent
  misc_feature (759)..(759): Glu or His or Asp or Absent or Leu or Met or Phe or Tyr
  misc_feature (760)..(760): Ala or Val or Absent or Ser
  misc_feature (761)..(761): Met or Ile or Leu or His or Absent
  misc_feature (762)..(762): Arg or Thr or Absent or Ala
  misc_feature (763)..(763): Leu or Glu or Absent or Val
  misc_feature (764)..(764): Ser or Absent
  misc_feature (765)..(765): Leu or Met or Ile or Ser or Absent
  misc_feature (766)..(766): Ile or Leu or Ala or Absent
  misc_feature (767)..(767): Glu or Ala or Asp or Ser or Absent
  misc_feature (768)..(768): His or Ser or Glu or Gln or Asp or Absent or Ala or Val or Gly
  misc_feature (769)..(769): Glu or Gln or Asp or Absent or His
  misc_feature (770)..(770): Glu or Pro or Gln or Absent or His or Arg
  misc_feature (771)..(771): His or Gln or Ala or Arg or Asn or Absent or Gly
  misc_feature (772)..(772): Gln or Glu or Arg or Ala or Lys or Thr or Absent or Met
  misc_feature (773)..(773): Arg or Glu or Lys or Thr or Absent or Val or Pro
  misc_feature (774)..(774): Arg or Lys or Ser or Asn or Asp or Absent or Thr or Gly or Gln or His
  misc_feature (775)..(775): Glu or Gln or Arg or Ile or Ala or Gly or Absent or His or Cys or Ser or Thr
  misc_feature (776)..(776): Ala or Ser or Glu or Arg or Asn or Absent or Gly or Pro or Gln
  misc_feature (777)..(777): Glu or Arg or Lys or Pro or Absent or Gly or Gln or Ser
  misc_feature (778)..(778): Glu or Gly or Asn or Absent or Thr or Ser or Ala or Val or Leu
  misc_feature (779)..(779): Arg or Glu or Gln or Thr or Pro or Ser or Asn or Absent or His or Ala
  misc_feature (780)..(780): Lys or Glu or Arg or Val or Ser or Leu or Absent or Trp
  misc_feature (781)..(781): Lys or Ser or Asp or Phe or Absent or Gly or Thr or Gln or Leu
  misc_feature (782)..(782): Lys or Asn or Glu or Arg or Asp or Absent or Gly or Pro or Trp
  misc_feature (783)..(783): Absent or Ala or Ser or Leu or Gln
  misc_feature (784)..(784): Absent or Lys or Ser or Pro
  misc_feature (785)..(785): Absent or Arg or Glu or Gln
  misc_feature (786)..(786): Absent or Arg or Gly or Ala
  misc_feature (787)..(787): Absent or Glu or Asp or Thr
  misc_feature (788)..(788): Absent or Lys or Ser or His
  misc_feature (789)..(789): Absent or Glu or Gly or Phe
  misc_feature (790)..(790): Absent or Ala or Asp or Thr
  misc_feature (791)..(791): Glu or Lys or Absent or Asp
  misc_feature (792)..(792): Ala or Absent or Lys or Glu
  misc_feature (793)..(793): Ala or Absent or Pro or Gln
  misc_feature (794)..(794): Glu or Ala or Absent or Asn
  misc_feature (795)..(795): Arg or Ala or Absent or Lys or Asn
  misc_feature (796)..(796): Ala or Absent or Ser or Pro or Val
  misc_feature (797)..(797): Ala or Absent or Gly or Arg
  misc_feature (798)..(798): Ala or Absent or Lys or Val or Gln
  misc_feature (799)..(799): Ala or Ser or Absent or Lys or Gly
  misc_feature (800)..(800): Glu or Ala or Absent or Thr or Ile
  misc_feature (801)..(801): Asn or Thr or Absent or Gly or Val or Ser
  misc_feature (802)..(802): Gly or Gln or Absent or Leu or Arg
  misc_feature (803)..(803): Glu or Gly or Absent or Asp or Arg or Ser
  misc_feature (804)..(804): Gly or Ser or Absent or Val
  misc_feature (805)..(805): Glu or Met or Absent or Gln or Ser or Pro
  misc_feature (806)..(806): Pro or Ala or Absent or Asn or Leu
  misc_feature (807)..(807): Ser or Thr or Absent or Pro or Asp
  misc_feature (808)..(808): Asp or Ser or Absent or Glu or Arg
  misc_feature (809)..(809): Ala or Ser or Absent or Asn or Asp or Pro
  misc_feature (810)..(810): Gln or Arg or Absent or Leu or Glu or Thr
  misc_feature (811)..(811): Gly or Leu or Absent or Thr or Glu or Tyr
  misc_feature (812)..(812): Ala or Ser or Absent or Glu or Ile
  misc_feature (813)..(813): Pro or Thr or Absent or Ser or Val or Gly
  misc_feature (814)..(814): Ser or Absent or Thr or Val or Gln
  misc_feature (815)..(815): Ser or Asn or Absent or Phe
  misc_feature (816)..(816): Ser or Asp or Absent or Glu
  misc_feature (817)..(817): Gln or Leu or Absent or Ala or Thr
  misc_feature (818)..(818): Ala or Ser or Absent or Asn or Gly
  misc_feature (819)..(819): Ala or Absent or Ser
  misc_feature (820)..(820): Pro or Gly or Absent or Ala
  misc_feature (821)..(821): Ser or Gly or Absent or Val
  misc_feature (822)..(822): Ser or Absent or Gln
  misc_feature (823)..(823): Ser or Ala or Absent or Thr
  misc_feature (824)..(824): Ser or Ala or Absent
  misc_feature (825)..(825): Ala or Asn or Absent or Gly
  misc_feature (826)..(826): Ala or Arg or Absent or Gly
  misc_feature (827)..(827): Pro or Phe or Absent or Ala
  misc_feature (828)..(828): Pro or Absent or Asn
  misc_feature (829)..(829): Pro or Val or Absent or Ser
  misc_feature (830)..(830): Ser or Gly or Absent or Glu
  misc_feature (831)..(831): Ser or Ala or Absent or Leu
  misc_feature (832)..(832): Ser or Ala or Absent or Asp
  misc_feature (833)..(833): Ser or Gln or Absent or Met
  misc_feature (834)..(834): Asn or Ser or Absent
  misc_feature (835)..(835): Asp or Val or Absent or Ala
  misc_feature (836)..(836): Pro or Leu or Absent or Asn
  misc_feature (837)..(837): Ser or Glu or Absent or Lys
  misc_feature (838)..(838): Gly or Glu or Absent
  misc_feature (839)..(839): Ser or Absent or Lys
  misc_feature (840)..(840): Leu or Glu or Absent or Gly
  misc_feature (841)..(841): Ala or Gly or Absent or Val
  misc_feature (842)..(842): Pro or Ser or Absent or Asp
  misc_feature (843)..(843): Ser or Absent or Arg
  misc_feature (844)..(844): Gly or Ser or Absent
  misc_feature (845)..(845): Gln or Asn or Absent or Glu
  misc_feature (846)..(846): His or Ala or Absent or Pro
  misc_feature (847)..(847): Ser or Ala or Absent or Arg
  misc_feature (848)..(848): Arg or Absent or Pro
  misc_feature (849)..(849): Ser or Absent or Gly
  misc_feature (850)..(850): Pro or Ser or Absent or Val
  misc_feature (851)..(851): Thr or Pro or Absent or Ser
  misc_feature (852)..(852): Pro or Leu or Absent or Thr
  misc_feature (853)..(853): Asp or Ala or Absent or Glu
  misc_feature (854)..(854): Ser or Ala or Absent
  misc_feature (855)..(855): Asn or Asp or Absent or Gly
  misc_feature (856)..(856): Asn or Ala or Absent or Ser
  misc_feature (857)..(857): Arg or Pro or Absent or Ser
  misc_feature (858)..(858): Thr or Absent
  misc_feature (859)..(859): Pro or Val or Absent or Glu
  misc_feature (860)..(860): Pro or Absent
  misc_feature (861)..(861): Absent or Arg or Pro
  misc_feature (862)..(862): Absent or Leu or Lys
  misc_feature (863)..(863): Absent or Pro or Ile
  misc_feature (864)..(864): Pro or Absent or Thr
  misc_feature (865)..(865): Phe or Val or Absent or Ile
  misc_feature (866)..(866): Ser or Absent or Lys
  misc_feature (867)..(867): Thr or Asn or Absent or Asp
  misc_feature (868)..(868): Met or Val or Absent or Leu
  misc_feature (869)..(869): Asn or Asp or Absent or Lys
  misc_feature (870)..(870): Absent or Pro or Gly
  misc_feature (871)..(871): Ala or Absent or Glu
  misc_feature (872)..(872): Ala or Absent or Gln
  misc_feature (873)..(873): Leu or Absent or Phe
  misc_feature (874)..(874): Leu or Gly or Absent or Ser
  misc_feature (875)..(875): Thr or Leu or Absent or Ser
  misc_feature (876)..(876): Ser or Absent or Met
  misc_feature (877)..(877): Gly or Gln or Absent or Leu
  misc_feature (878)..(878): Thr or Absent or Glu
  misc_feature (879)..(879): Ala or Thr or Absent or Gly
  misc_feature (880)..(880): Thr or Met or Absent or Ser
  misc_feature (881)..(881): Ala or Asp or Absent or Ser
  misc_feature (882)..(882): Phe or Glu or Absent or Lys
  misc_feature (883)..(883): Leu or Absent or Asn
  misc_feature (884)..(884): Asn or Arg or Absent or Met
  misc_feature (885)..(885): Absent or Glu or His
  misc_feature (886)..(886): Absent or Leu
  misc_feature (887)..(887): Ala or Ile or Absent or Arg
  misc_feature (888)..(888): Ser or Asp or Absent or His
  misc_feature (889)..(889): Ser or Ala or Absent or Val
  misc_feature (890)..(890): Asp or Absent or Ser
  misc_feature (891)..(891): Pro or Absent or Ser
  misc_feature (892)..(892): Ser or Met or Absent or Ala
  misc_feature (893)..(893): Ser or Leu or Absent
  misc_feature (894)..(894): Gly or Pro or Absent or Ser
  misc_feature (895)..(895): Ser or Absent
  misc_feature (896)..(896): Thr or Ser or Absent or Asn
  misc_feature (897)..(897): Thr or Ser or Absent
  misc_feature (898)..(898): Pro or Asp or Absent or Ser
  misc_feature (899)..(899): Ser or Absent or Leu
  misc_feature (900)..(900): Val or Ala or Absent
  misc_feature (901)..(901): Pro or Absent or Glu
  misc_feature (902)..(902): Ile or Ser or Absent
  misc_feature (903)..(903): Pro or Absent or Ala
  misc_feature (904)..(904): Ala or Met or Absent or Phe
  misc_feature (905)..(905): Val or Pro or Absent or Gly
  misc_feature (906)..(906): Thr or Val or Absent or Glu
  misc_feature (907)..(907): Leu or Glu or Absent or Ser
  misc_feature (908)..(908): Thr or Ser or Absent or Ile
  misc_feature (909)..(909): Gly or Absent
  misc_feature (910)..(910): Asp or Gly or Absent or Ser
  misc_feature (911)..(911): Ala or Leu or Absent or Gly
  misc_feature (912)..(912): Val or Ala or Absent or Thr
  misc_feature (913)..(913): Pro or Arg or Absent
  misc_feature (914)..(914): Thr or Pro or Absent or His
  misc_feature (915)..(915): Thr or Leu or Absent or Asn
  misc_feature (916)..(916): Gly or Arg or Absent
  misc_feature (917)..(917): Pro or Leu or Absent or Ser
  misc_feature (918)..(918): Ser or Val or Absent
  misc_feature (919)..(919): Pro or Ala or Absent or Ser
  misc_feature (920)..(920): Glu or Ala or Absent or Ser
  misc_feature (921)..(921): Ala or Pro or Absent or Leu
  misc_feature (922)..(922): Pro or Glu or Absent or Ala
  misc_feature (923)..(923): Ser or Absent or Ala
  misc_feature (924)..(924): Ala or Val or Absent or Ile
  misc_feature (925)..(925): Ser or Pro or Absent or His
  misc_feature (926)..(926): Ser or Val or Absent or Gly
  misc_feature (927)..(927): Val or Pro or Absent or Phe
  misc_feature (928)..(928): Ser or Gln or Absent or Arg
  misc_feature (929)..(929): Ser or Pro or Absent
  misc_feature (930)..(930): Ser or Ile or Absent or Leu
  misc_feature (931)..(931): Ser or Ala or Absent
  misc_feature (932)..(932): Val or Gly or Absent or Ala
  misc_feature (933)..(933): Leu or Absent or Met
  misc_feature (934)..(934): Thr or Gly or Absent or Ile
  misc_feature (935)..(935): Gly or Ser or Absent or Asp
  misc_feature (936)..(936): Asp or Val or Absent
  misc_feature (937)..(937): Leu or Absent or Thr
  misc_feature (938)..(938): Pro or Ala or Absent
  misc_feature (939)..(939): Arg or Glu or Absent or Ser
  misc_feature (940)..(940): Pro or Gln or Absent or Gly
  misc_feature (941)..(941): Ala or His or Absent or Asp
  misc_feature (942)..(942): Ser or Asp or Absent
  misc_feature (943)..(943): Leu or Pro or Absent or Gly
  misc_feature (944)..(944): Ser or Absent or Glu
  misc_feature (945)..(945): Ser or Ile or Absent
  misc_feature (946)..(946): Ser or Absent or Met
  misc_feature (947)..(947): Thr or Ser or Absent or Asn
  misc_feature (948)..(948): Thr or Gln or Absent or Arg
  misc_feature (949)..(949): Pro or His or Absent
  misc_feature (950)..(950): Ser or Gly or Absent
  misc_feature (951)..(951): Ser or Tyr or Absent
  misc_feature (952)..(952): Gly or Pro or Absent or Thr
  misc_feature (953)..(953): Ser or Absent or Asn
  misc_feature (954)..(954): Ser or Pro or Absent or Glu
  misc_feature (955)..(955): Leu or Pro or Absent or Gln
  misc_feature (956)..(956): Gly or Pro or Absent or Val
  misc_feature (957)..(957): Pro or Glu or Absent or Gln
  misc_feature (958)..(958): Asp or Val or Absent or Gly
  misc_feature (959)..(959): Pro or Ser or Absent or Ala
  misc_feature (960)..(960): Ser or Gly or Absent or Pro
  misc_feature (961)..(961): Leu or Ser or Absent or Ala
  misc_feature (962)..(962): Ala or Absent or Val
  misc_feature (963)..(963): Gly or Lys or Absent
  misc_feature (964)..(964): His or Absent or Glu
  misc_feature (965)..(965): Ala or Absent or Pro
  misc_feature (966)..(966): Val or Thr or Absent or Ser
  misc_feature (967)..(967): Tyr or Ser or Absent or Glu
  misc_feature (968)..(968): Gly or Phe or Absent or Asn
  misc_feature (969)..(969): Thr or Ser or Absent
  misc_feature (970)..(970): Leu or Thr or Absent or Ala
  misc_feature (971)..(971): Pro or Thr or Absent
  misc_feature (972)..(972): Ser or Thr or Absent or Asn
  misc_feature (973)..(973): Ser or Thr or Absent or Glu
  misc_feature (974)..(974): Pro or Thr or Absent
  misc_feature (975)..(975): Glu or Pro or Absent or Asp
  misc_feature (976)..(976): Ser or Pro or Absent or Gln
  misc_feature (977)..(977): Ile or Leu or Absent or Val
  misc_feature (978)..(978): Gly or Asp or Absent or Thr
  misc_feature (979)..(979): Gln or Ala or Absent or Leu
  misc_feature (980)..(980): Ser or His or Absent or Leu
  misc_feature (981)..(981): Pro or Ala or Absent or Ser
  misc_feature (982)..(982): Pro or Ser or Absent
  misc_feature (983)..(983): Leu or Ala or Absent or Ser
  misc_feature (984)..(984): Glu or Pro or Absent
  misc_feature (985)..(985): Ala or Absent or Ser
  misc_feature (986)..(986): Ser or Val or Absent or Leu
  misc_feature (987)..(987): Ser or Pro or Absent or Glu
  misc_feature (988)..(988): Lys or Gly or Absent or Gln
  misc_feature (989)..(989): Ser or Absent or Lys
  misc_feature (990)..(990): Ser or Absent or Asp
  misc_feature (991)..(991): Asn or Gly or Absent or Thr
  misc_feature (992)..(992): Asp or Phe or Absent or Leu
  misc_feature (993)..(993): Arg or Ala or Absent or Gly
  misc_feature (994)..(994): Gly or Ser or Absent or Lys
  misc_feature (995)..(995): Asn or Ala or Absent or Glu
  misc_feature (996)..(996): Ala or Absent or Val
  misc_feature (997)..(997): Ser or Ala or Absent or His
  misc_feature (998)..(998): Leu or Val or Absent or Met
  misc_feature (999)..(999): Pro or Absent or Ser
  misc_feature (1000)..(1000): Ser or Pro or Absent
  misc_feature (1001)..(1001): Asp or Ser or Absent or Ala
  misc_feature (1002)..(1002): Ser or Arg or Absent or Glu
  misc_feature (1003)..(1003): Ser or Ile or Absent or Val
  misc_feature (1004)..(1004): Pro or Met or Absent or Leu
  misc_feature (1005)..(1005): Thr or Asn or Absent or Pro
  misc_feature (1006)..(1006): Asp or Pro or Absent or Gln
  misc_feature (1007)..(1007): Asp or Asn or Absent or Ser
  misc_feature (1008)..(1008): Gly or Asn or Absent or Ser
  misc_feature (1009)..(1009): Thr or Pro or Absent or Leu
  misc_feature (1010)..(1010): Ala or Phe or Absent or Gly
  misc_feature (1011)..(1011): Pro or Arg or Absent or Thr
  misc_feature (1012)..(1012): Arg or Absent or Ala
  misc_feature (1013)..(1013): Absent or Ser
  misc_feature (1014)..(1014): Absent or Met
  misc_feature (1015)..(1015): Absent or Gly
  misc_feature (1016)..(1016): Absent or Glu
  misc_feature (1017)..(1017): Absent or Gln
  misc_feature (1018)..(1018): Absent or His
  unsure (1)..(1018): unsure at all Xaa locations
XXXXXXXXXXXXXXXXXXXXXXXXXXXXXXXXXXXXXXXXXXXXXXXXXXXXXXXXXXXXXXXXXXXXXXXXXXXXXXXXXXXXXXXXXXXXXXXXXXXXXXXXXXXXVXXXYXXPXXXXXXXXXXXXXXXXXXXXXXXXXXXXXXXXXXXXXXXXXXXXXXXXXXXDXDXXXXXXLIXXXKLAPXXXGXXXXXXXXXXXXXXXXXXXXXXXXXXXXXXXXXXXXXXXXXXXXXXXXXXXXXXXXXXXXXXXXXXXXXXXXXXXXXXXXXXXXXXXXXXXXXXXXXXXXXXXXXXXXXXXXXXXXEXXXXEXXXXXXQXXXXXXXXXXXXXXXXXXXXXXXXXXXXXXXXXXXXXXXXXXXXXXXXXXXXXXXYXXXXXXXXXXXXXXXXXXXXXXXXXXXXXXXXXXXXXXXXXXXXXXXXXXXXXXXXXXXXXXXXXXXXXXXXXXXXXXXXXXXXXXXXXXXXXXXXXXXXXXXXXXXXXXXXXXXXXXXXXXXXXXXXXXXXXXXXXXXXXXXXXXXXXXXXXXXXXXXXXXXXXXXXXXXXXXXXXXXXXXXXXXXXXXXXXXXXXXXXXXXXXXXXXXXXXXXXXXXXXXXXXXXXXXXXXXXXXXXXXXXXXXXXXXXXXXXXXXXXXXXXXXXXXXXXXXXXXXXXXXXXXXXXXXXXXXXXXXXXXXXXXXXXXXXXXXXXXXXXXXXXXXXXXXXXXXXXXXXXXXXXXXXXXXXXXXXXXXXXXXXXXXXXXXXXXXXXXXXXXXXXXXXXXXXXXXXXXXXXXXXXXXXXXXXXXXXXXXXXXXXXXXXXXXXXXXXXXXXXXXXXXXXXXXXXXXXXXXXXXXXXXXXXXXXXXXXXXXXXXXXXXXXXXXXXXXXXXXXXXXXXXXXXXXXXXXXXXXXXXXXXXXXXXXXXXXXXXXXXXXXXXXXXXXXXXXXXXXXXXXXXXXXXXXXXXXXXXXXXXXXXXXXXXXXXXXXXXXXXXXXXXXXXXXXXXXXXXXXXXXXXXXXXXXXXXXXXXXXXXXXX

SEQ ID NO: 1128 - DNA, 421 bp, Artificial sequence
  Construct for Overexpression of Zea mays mir319
gccgcgttgtttaagatttccattgtatttcttgttttgcaattcatttggtgctccaagattgtggctttgactacatgtgtaagaagagagctctcttcagtccactctcagatggctgtagggttttattagctgccgaatcatccattcacctaccaagaaagttgcaggagtgtatctcttggtagcggactggatgacgcgggagctaaaatttagctctgcgccgtttgtggttggactgaagggtgctcccttgctcaagcactcgtgcataaaatcatgccctaatgttaataataatcttcagatttctatatgagttttatgtccagtgtgttcagtttcaagatttggactttttttttatatcagtggtcaatgacctgggaaatctacagacagaaatctactgtag

SEQ ID NO: 1129 - DNA, 336 bp, Artificial sequence
  Synthetic miRNA targeting maize GW2
aattcattacattgataaaacacaattcaaaagatcaatgttccacttcatgcaaagacatttccaaaatatgtgtaggtagaggggttttacaggatcgtccttgttcccgcctccgcacccgccacatgatgcagctatgtttgctatcgggtgcggaggcgggaacaaggtcgcccttgttggactgtccaactcctactgattgcggatgcacttgccacaaatgaaaatcaaagcgaggggaaaagaatgtagagtgtgactacgattgcatgcatgtgatttaggtaattaagttacatgattgtctaattgtgtttatggaattgtata

SEQ ID NO: 1130 - DNA, 408 bp, Artificial sequence
  Synthetic miRNA targeting maize HB4
ggcagagccgtgcccgtctcatcccctgcccgtgcaagcagctaggtaggacgatttgagcgtggtgttaggccgaaccgctgaaggaagattgctccactgttgactgcattcgaacacggggagagggcccaaatgtattgcttatattcagcaatataatgttcgggccctctaatcgtgtttgaatatagtcgatagtggaagaacggtaacatatgtggtttgcagcaggtgagcaggatgggtgtggatgattgaatatctctgttcagtgttttcatcatctgactgaacactgaatcagcttgctgacgttagaggtttcagtttacctaatttatggtctgtacccatgaaaagtgggaaaaggctgaagaattcgatttctttctttctttcaatgtt

SEQ ID NO: 1131 - DNA, 684 bp, Artificial sequence
  miRNA resistant ANR1 gene
atggggagagggaagattgccatcaagaggatcgacaacacgatgaaccggcaggtgaccttctcgaagcggcgcggcgggctgatgaagaaggcccgggagctggccatcctctgcgacgccgacgtcggcctcattgtcttctcctgcaccggccgcctctacgacttctccagctcaagcatgaaatcaataatagagcggtaccaggaggcaggagaggagcattgtcggttgctgaacccaatgtcagaggctaagttttggcagcgggaggttacaactctccgacagcaggtacaaaacttacaccacaacaacaggcaacttttgggagaggaaatctccaacttcacagttagagatctgcagcttctccagaaccaagttgagatgagcctacattccataagaaataaaaaggatcaacttttggcagaggagattctaaaactcaatgaaaaggggtctcttgttcaaaaggagaacagtgaacttcgcaagaagttcaacattgctcatcaacgcaacatagaattacacaagaagcttaactctggagaaagcacgtcaagtgagcaagttaccagaagctcaaaggatcccggagaatcgagtacaccccgtgattcacgtgtgtgtattgaccttgaattgagtcaaaaagaagttgaagatgaatag

SEQ ID NO: 1132 - DNA, 411 bp, Artificial sequence
  Synthetic miRNA targeting maize LG1
accggcagagccgtgcccgtctcatcccctgcccgtgcaagcagctaggtaggacgatttgagcgtggtgttaggccgaaccgctgaaggaagattgctccactgttgactgcatttcttgctgctactctctgctaaatgtattgcttatattcagcaatataatgttcagcagagagaaccagcaagaaatatagtcgatagtggaagaacggtaacatatgtggtttgcagcaggtgagcaggatgggtgtggatgattgaatatctctgttcagtgttttcatcatctgactgaacactgaatcagcttgctgacgttagaggtttcagtttacctaatttatggtctgtacccatgaaaagtgggaaaaggctgaagaattcgatttctttctttctttcaatgtt

SEQ ID NO: 1133 - DNA, 546 bp, Artificial sequence
  mir444 overexpression
ccgttgcttccccgttagcttctcccttgtcacaccccctcgcttcgttctgcgtagtttcggggtttgacaccgcttgtctatcccgttcctatagcttttagggtttcgagctcaaactccgcgccggcatctcagttgctgcaagtggcggcggcaagctagaggcagcaactgcataccttgcaagaaaaaatcggttttgttgacgtaccgatgattttcttgcaagttgtgcagttgttgtctcaagcttgctgcctccctttgccagaactattgaatgtgaaagcacaagctgtctaagcaattccagagtacagaagggtatactctgatcctagaaaaggtggcatattctatcggaccagagtcaccagaccttggatgaaagggcttcagtttaagtcctacaagagatggtacgatataggcagaaaaaaattggcattcctaccctatcttggttctaagctgtaaaccttggcgtaatttggttaaatttgtctgagccttcgcgatggcaaccaccaaaagccaactacg

SEQ ID NO: 1134 - DNA, 1182 bp, Artificial sequence
  miRNA-resistant maize SBP sequence
atggactgcaacatggtatcttcgtcccagtgggattgggagcatttgatcatgtccaatccgtcaaggactgaagatgacagcaaacagctacctactgagtgggaaattgaaaaaggtgaaggaattgaatctatagttccacatttctcaggccttgagagagtcagtagtggctctgccaccagcttctggcacactgctgtatcgaaaagctcacagtcgacctctatcaactcatcatctcccgaagccaaacgatgcaagcttgcatcagaaagttcccctggagattcttgcagcaacatagactttgtccaggtgaaggctcccacagctctcgaggtatccgttgcctcagctgaatcagatctttgtttaaaactaggaaagcggacatactctgaagaatactggggtagaaacaataatgaaatttcagcggtttctatgaagttgttaactccatctgttgtcgctgggaaatccaaattgtgtggtcagagcatgccagtcccgcgttgccaaattgatggctgtgaactggatctctcatctgctaagggttatcatcgtaagcacaaagtctgcgaaaagcattcaaagtgcccaaaagttagcgtgagtggcctggaacgtcggttctgccaacagtgtagcaggttccatgctgtctctgaatttgatgagaagaaacgaagctgccgaaaacgtctttctcatcataatgcgaggcgtcgtaagccacaaggagtattttcaatgaatcccgagagggtgtatgatcgaagacagcatacaaatatgttgtggaatggggtgtcccttaacgcgagatctgaagaaatgtatgaatggggtaataacacttatgatacaaagcctagacaaacggaaaaaagctttactctgagcttccagagaggtaatggctctgaggaccagctggttgctagtagcagccgtatgttctctacatctcaaacctcaggtgggttcccagcaggaaagtccaagtttcaacttcatggcgaagatgtgggagaatactcaggagtcctccatgaatctcaagatatccaccgagcattgagcttgttaagtacctcttcggatcccctggcccaaccacatgtgcagccattttctctactctgttcatatgatgttgtaccaaaatag

SEQ ID NO: 1135 - DNA, 641 bp, Artificial sequence
  miRNA decoy targeting maize miRNA 393
cctcaaagaggcagccatggctccacataaaagcgcccaatgggagctccctcttctccccccacgcccctccccctcttgataagcccacgtcggcggcagggggggcggccgccaggcttgctatagctggtccatggcaccatacatgtaagcacgcacacaggcacacacacacacgcacgcaatgatctacgtatctagcagcagcttatcatgtcgtcatcatgcatgcatggccgacggaggtcgtcatcttatctgggagcgtgtgtgtcttggcaatgggaagctgcatgcgcctctcgggcgtcggcgcgtcggcgcctagctgtagggcggcgtgccatagagctgcctcctgccgctcacaccatgctgttgacgaggactgatggtggccatggcctctcggcgtcggtggcggcggcgccggcgccgagttttacctctctactaaggtgatcaatgcgactatccctttggaattgttctcatctatctgggtctgtctgttggctgcccggtgacggtatacggtgatgttctaatagtactcaattggtcttggatcggagttcatgctacggctcctctgttatatattacacggctgacggctcctccttattaatgtgtac

SEQ ID NO: 1136 - DNA, 638 bp, Artificial sequence
  miRNA decoy targeting maize miRNA 398
cctcaaagaggcccatggctccacataaaagcgcccaatgggagctccctcttctccccccacgcccctccccctcttgataagcccacgtcggcggcagggggggcggccgccaggcttgctatagctggtccatggcaccatacatgtaagcacgcacacaggcacacacacacacgcacgcaatgatctacgtatctagcagcagcttatcatgtcgtcatcatgcatgcatggccgacggaggtcgtcatcttatctgggagcgtgtgtgtcttggcaatgggaagctgcatgcgcctctcgggcgtcggcgcgtcggcgcctagctgtagggcggcgtgccatagagctgcctcctgccgctcacaccatgctgttgacgaggactgatggtggccatggcctctcggcgtcggtggcggcggcgccggcgccgagttttacctctctactaagggaggggcgaccgtatgagaacacaattgttctcatctatctgggtctgtctgttggctgcccggtgacggtatacggtgatgttctaatagtactcaattggtcttggatcggagttcatgctacggctcctctgttatatattacacggctgacggctcctccttattaatgtgtac

SEQ ID NO: 1137 - DNA, 641 bp, Artificial sequence
  miRNA decoy targeting maize miRNA 408
cctcaaagaggcagccatggctccacataaaagcgcccaatgggagctccctcttctccccccacgcccctccccctcttgataagcccacgtcggcggcagggggggcggccgccaggcttgctatagctggtccatggcaccatacatgtaagcacgcacacaggcacacacacacacgcacgcaatgatctacgtatctagcagcagcttatcatgtcgtcatcatgcatgcatggccgacggaggtcgtcatcttatctgggagcgtgtgtgtcttggcaatgggaagctgcatgcgcctctcgggcgtcggcgcgtcggcgcctagctgtagggcggcgtgccatagagctgcctcctgccgctcacaccatgctgttgacgaggactgatggtggccatggcctctcggcgtcggtggcggcggcgccggcgccgagttttacctctctactaaggtccagggaagactaggcagtgcatgattgttctcatctatctgggtctgtctgttggctgcccggtgacggtatacggtgatgttctaatagtactcaattggtcttggatcggagttcatgctacggctcctctgttatatattacacggctgacggctcctccttattaatgtgtac

SEQ ID NO: 1138 - DNA, 840 bp, Artificial sequence
  miRNA decoy targeting maize 528
cctcaaagaggcagccatggctccacataaaagcgcccaatgggagctccctcttctccccccacgcccctccccctcttgataagcccacgtcggcggcagggggggcggccgccaggcttgctatagctggtccatggcaccatacatgtaagcacgcacacaggcacacacacacacgcacgcaatgatctacgtatctagcagcagcttatcatgtcgtcatcatgcatgcatggccgacggaggtcgtcatcttatctgggagcgtgtgtgtcttggcaatgggaagctgcatgcgcctctcgggcgtcggcgcgtcggcgcctagctgtagggcggcgtgccatagagctgcctcctgccgctcacaccatgctgttgacgaggactgatggtggccatggcctctcggcgtcggtggcggcggcgccggcgccgagttttacctctctactaaggtaggggtgaccagctgagaacacaaagtactccgatcgcgttaacgctttatcacgataccttctaccacatatcactaacaacatcaacactcatcactccagggaagactaggcagtgcattctcgacgacatccactcgatcactactctcacacgaccgattaactcctcatccacgcggcctcctgcaggagcatcctctgcatctagccccttccacaattgttctcatctatctgggtctgtctgttggctgcccggtgacggtatacggtgatgttctaatagtactcaattggtcttggatcggagttcatgctacggctcctctgttatatattacacggctgacggctcctccttattaatgtgtac

SEQ ID NO: 1139 - DNA, 640 bp, Artificial sequence
  miRNA decoy for maize miRNA 169g
cctcaaagaggcagccatggctccacataaaagcgcccaatgggagctccctcttctccccccacgcccctccccctcttgataagcccacgtcggcggcagggggggcggccgccaggcttgctatagctggtccatggcaccatacatgtaagcacgcacacaggcacacacacacacgcacgcaatgatctacgtatctagcagcagcttatcatgtcgtcatcatgcatgcatggccgacggaggtcgtcatcttatctgggagcgtgtgtgtcttggcaatgggaagctgcatgcgcctctcgggcgtcggcgcgtcggcgcctagctgtagggcggcgtgccatagagctgcctcctgccgctcacaccatgctgttgacgaggactgatggtggccatggcctctcggcgtcggtggcggcggcgccggcgccgagttttacctctctactaaggaaggcaagtcactatccttggctaattgttctcatctatctgggtctgtctgttggctgcccggtgacggtatacggtgatgttctaatagtactcaattggtcttggatcggagttcatgctacggctcctctgttatatattacacggctgacggctcctccttattaatgtgtac

SEQ ID NO: 1140 - DNA, 640 bp, Artificial sequence
  miRNA decoy for maize miRNA 397
cctcaaagaggcagccatggctccacataaaagcgcccaatgggagctccctcttctccccccacgcccctccccctcttgataagcccacgtcggcggcagggggggcggccgccaggcttgctatagctggtccatggcaccatacatgtaagcacgcacacaggcacacacacacacgcacgcaatgatctacgtatctagcagcagcttatcatgtcgtcatcatgcatgcatggccgacggaggtcgtcatcttatctgggagcgtgtgtgtcttggcaatgggaagctgcatgcgcctctcgggcgtcggcgcgtcggcgcctagctgtagggcggcgtgccatagagctgcctcctgccgctcacaccatgctgttgacgaggactgatggtggccatggcctctcggcgtcggtggcggcggcgccggcgccgagttttacctctctactaaggaatcaacgctgctacactcaatgaattgttctcatctatctgggtctgtctgttggctgcccggtgacggtatacggtgatgttctaatagtactcaattggtcttggatcggagttcatgctacggctcctctgttatatattacacggctgacggctcctccttattaatgtgtac

What is claimed is:

1. A recombinant DNA construct comprising a promoter functional in plant cells that is operably linked to a polynucleotide that is transcribed into an RNA that suppresses the expression of a protein having a SBP pfam domain scoring above the pfam gathering cutoff of 25.000.

2. The recombinant DNA construct of claim 1, wherein said protein has an amino acid sequence of SEQ ID NO: 19 or a homolog thereof.

3. The recombinant DNA construct of claim 2, wherein said RNA is a miRNA.

4. A recombinant DNA construct comprising a promoter functional in plant cells that is operably linked to a polynucleotide that (a) encodes a protein that has an amino acid sequence having at least 95% identity over at least 95% of the length of a reference sequence selected from the group consisting of SEQ ID NO: 16-21 when the amino acid sequence is aligned with the reference sequence; or (b) is transcribed into a precursor for a miRNA that has the function of a miRNA having a sequence selected from the group consisting of SEQ ID NO: 1-2, 7, 9-13, and 15;
and wherein said recombinant DNA construct is stably integrated into a chromosome in a transgenic plant cell.

5. A plant comprising the recombinant DNA construct of claim 4.

6. A plant cell comprising a stably integrated recombinant DNA construct wherein said recombinant DNA construct comprises a promoter that is functional in said plant cell operably linked to a polynucleotide that is expressed in said cell to effect:
(a) modulation of expression of a protein relative to a control wherein the polynucleotide is transcribed into:
(1) a messenger RNA encoding the protein;
(2) a miRNA decoy for a miRNA which targets a messenger RNA encoding the protein;
(3) a miRNA-resistant messenger RNA encoding the protein;
(4) a dsRNA which is processed into siRNAs which targets a messenger RNA encoding the protein;
(5) a miRNA that targets a messenger RNA encoding the protein;
(6) a miRNA-sensitive messenger RNA encoding the protein;
(7) a ta-siRNA which is processed into siRNAs which targets a messenger RNA encoding the protein; or
(8) a small RNA which prevents cleavage of a messenger RNA encoding the protein; or
(b) modulation of the activity of a miRNA relative to a control wherein the polynucleotide is transcribed into:
(1) an RNA that results in the production of the miRNA which has its activity modulated; or
(2) a miRNA decoy which targets the miRNA which has its activity modulated;
and wherein said plant cell is selected by screening a population of transgenic plants that have said recombinant DNA construct in plant cells and an enhanced trait as compared to control plants; and wherein said enhanced trait is enhanced water use efficiency, enhanced cold tolerance, enhanced heat tolerance, enhanced resistance to salt exposure, enhanced shade tolerance, increased yield, enhanced nitrogen use efficiency, enhanced seed protein or enhanced seed oil.

7. The plant cell of claim 6 wherein:
(a) transcription of said polynucleotide results in enhanced expression of the protein relative to the control and wherein the protein has at least 95% identity over at least 95% of the length of a reference sequence selected from SEQ ID NOs: 18, and 20;
(b) transcription of said polynucleotide results in suppression of the protein relative to a control and wherein the protein has the function of a protein with an amino acid sequence selected from SEQ ID NOs: 16-17, 19, and 21;
(c) transcription of said polynucleotide results in enhanced activity, relative to a control, of a miRNA having the function of a miRNA with a sequence selected from SEQ ID NOs: 1,2, and 7; or
(d) transcription of said polynucleotide results in suppressed activity, relative to a control, of a miRNA having the function of a miRNA with a sequence selected from selected from SEQ ID NOs: 9-13 and 15.

8. The plant cell of claim 7 further comprising DNA expressing a protein that provides tolerance from exposure to an herbicide comprising an agent applied at levels that are lethal to a wild type of said plant cell.

9. The plant cell of claim 8 wherein the agent of said herbicide is a glyphosate, dicamba, or glufosinate compound.

10. A transgenic plant comprising a plurality of plant cells of claim 7.

11. The transgenic plant of claim 10 which is homozygous for said recombinant DNA construct.

12. A transgenic seed comprising a plurality of plant cells of claim 7.

13. The transgenic seed of claim 12 from a corn, soybean, cotton, canola, alfalfa, wheat, rice, sugarcane, or sugar beets.

14. A transgenic pollen grain comprising a haploid derivative of a plant cell of claim 7.

15. A method for manufacturing non-natural, transgenic seed that can be used to produce a crop of transgenic plants with an enhanced trait resulting from expression of stably-integrated recombinant DNA construct in a plant cell of claim 7, wherein said method for manufacturing said transgenic seed comprises:
(a) screening a population of plants for said enhanced trait and said recombinant DNA construct, wherein individual plants in said population exhibit said trait at a level less than, essentially the same as or greater than the level that said trait is exhibited in control plants which do not contain said recombinant DNA construct, wherein said enhanced trait is selected from the group of enhanced traits consisting of enhanced water use efficiency, enhanced cold tolerance, enhanced heat tolerance, enhanced resistance to salt exposure, enhanced shade tolerance, increased yield, enhanced nitrogen use efficiency, enhanced seed protein and enhanced seed oil;
(b) selecting from said population one or more plants that exhibit said trait at a level greater than the level that said trait is exhibited in control plants, and
(c) collecting seed from selected plant from step b.

16. The method of claim 15 wherein said method for manufacturing said transgenic seed further comprises:
(a) verifying that said recombinant DNA construct is stably integrated in said selected plants, and
(b) analyzing tissue of said selected plant to determine the expression or suppression of a protein having the function of a protein having an amino acid sequence selected from the group consisting of one of SEQ ID NOs:16-21 or to determine the expression or suppression of a miRNA having the function of a miRNA having a sequence selected from the group consisting of SEQ ID NOs: 1,2,7, 9-13, and 15.

17. The method of claim 16 wherein said seed is corn, soybean, cotton, canola, alfalfa, wheat, rice, sugarcane, or sugar beet seed.

18. A method of producing hybrid corn seed comprising:
(a) acquiring hybrid corn seed from an herbicide tolerant corn plant which also has stably-integrated, recombinant DNA construct in a plant cell of claim 7;
(b) producing corn plants from said hybrid corn seed, wherein a fraction of the plants produced from said hybrid corn seed is homozygous for said recombinant DNA construct, a fraction of the plants produced from said hybrid corn seed is hemizygous for said recombinant DNA construct, and a fraction of the plants produced from said hybrid corn seed has none of said recombinant DNA construct;
(c) selecting corn plants which are homozygous and hemizygous for said recombinant DNA by treating with an herbicide;
(d) collecting seed from herbicide-treated-surviving corn plants and planting said seed to produce further progeny corn plants;
(e) repeating steps (c) and (d) at least once to produce an inbred corn line; and
(f) crossing said inbred corn line with a second corn line to produce hybrid seed.
